United States Patent Application Publication US 2022/0096574 A1 - sequence listing, part 21

SEQ ID NO: 92753 - protein, 78 aa, Paracoccus sp.
  misc_feature (1)..(78): tr|A0A447IMD8|A0A447IMD8_9RHOB Isochorismatase OS=Parac occus sp. M1-83 OX=2491866 GN=dhbB PE=4 SV=1
MTLTLDRMRADIAKAIHMDPSEIRDDDHLGDLGLDSLRLMRLVLAWEEAGLTADFSLFAEYETLGDWWTHIVAPAQGA

SEQ ID NO: 92754 - protein, 78 aa, Paracoccus yeei
  misc_feature (1)..(78): tr|A0A1V0GRI9|A0A1V0GRI9_9RHOB Isochorismatase OS=Parac occus yeei OX=147645 GN=A6J80_08725 PE=4 SV=1
MTVKTDLSPAWLAARVQKMIEDDCDIDPAENLVLYGLDSIAVMTFSSELKQMGVEASFEELAREPTLDAWWALIQPRL

SEQ ID NO: 92755 - protein, 205 aa, Paraglaciecola polaris
  misc_feature (1)..(205): tr|K6Z6Z7|K6Z6Z7_9ALTE Isochorismatase OS=Paraglaciecol a polaris LMG 21857 OX=1129793 GN=GPLA_1045 PE=4 SV=1
MNKKTTNDHDLSVGSLTLGSRPALVIIDMSLGFTQSESRLGGDFTAEVDNIKHLLEQFRARDLPILYTTVVYHNEQQARVFRTRLPDLNILQANSKWVQIDPRITPRPDEPIIEKCWASGFFKTDLHTHLQNKNADSIVVVGLTTSGCVRATAVDGLQHDYPVFVVPQGCGDRNLTAHNASLHDINAKYGVVVSLEELCGALAQL

SEQ ID NO: 92756 - protein, 194 aa, Pararhodospirillum photometricum
  misc_feature (1)..(194): tr|H6SLH4|H6SLH4_PARPM Isochorismatase hydrolase OS=Par arhodospirillum photometricum DSM 122 OX=1150469 GN=RSP PHO_02213 PE=4 SV=1
MPFGELPMTAPVPSLIKADESVLVIIDVQEKLCPVMADPRRVLLNGSRLLRAANRLGVPVVVTEQYPKGLGPTMHDIRVDMPQGAMVEKRFFSAALEPAVRERLESLGRRQAVLCGIEMHVCVTQTALGLKDQGWSVFVVEDACSSRSPESVAQAKQRLATQGIPLVNVEMALFEWLATKDHPAFKEISTTLIR

SEQ ID NO: 92757 - protein, 206 aa, Pectobacterium atrosepticum
  misc_feature (1)..(206): tr|Q6D3P2|Q6D3P2_PECAS Putative phenazine antibiotic bi osynthesis protein OS=Pectobacterium atrosepticum (stra in SCRI 1043 / ATCC BAA-672) OX=218491 GN=ehpB PE=4 SV= 1
MAIPQIEEYDLGSPALSVKNSVSWNIEPSRSLLLVHDMQDFFLAPLPTMLRNTLIKNCEKLIDWARKHSIPIVYTGQKGNMTPKERGLLYDFWGAGMNAEPAHTKITSALSPQPEDHVLKKWRYSAFFSSPLDEIFNRNQKDQIIICGVYAQIGILTTALDAYSRDIEVFLVQDGIADFSCALHQNMLTYAASCCASILPVEEVLK

SEQ ID NO: 92758 - protein, 291 aa, Pectobacterium carotovorum
  misc_feature (1)..(291): tr|C6DJV7|C6DJV7_PECCP Isochorismatase OS=Pectobacteriu m carotovorum subsp. carotovorum (strain PC1) OX=561230 GN=PC1_0464 PE=4 SV=1
MAIPSIASYPLPRAQDFPENKVSWAFEPERAVLLIHDMQDYFVNFYGADSPLAQQLIENIAALRTYCKARGIPVVYTAQPNAQSAADRALLNDMWGAGLNNHPDKQRVVSALAPDEHDTVLVKWRYSAFHRSPLEPMMKEMGKDQLIICGVYGHIGCMITATDAFMRDIKPFMVGDAVADFSLQEHQMALKYVATRAGRVVSTAELTGAKMAQTLTKQGLRAHLLTLIDEEEDQFDEDENLIDYGLDSVRMMALLTEWRNQGVTLSFVDLARNPSLNAWWALIEKQQGAAS

SEQ ID NO: 92759 - protein, 160 aa, Pediococcus damnosus
  misc_feature (1)..(160): tr|A0A0R2HVX2|A0A0R2HVX2_9LACO Isochorismatase OS=Pedio coccus damnosus OX=51663 GN=ADU72_1327 PE=4 SV=1
MADVLIVIDMQNALKRMANFDKVVAGINERIALYRQARKAIFFVQTADDEIPSDTKKFQLAADLDFNEQRDEFIVKTTPDAFYHTNLEAYLKNYNTKSLEVCGGQAEYCVDTTIRVARHLDYQVEVKRDLVTTFDSKLLDAATIVKHHESVWDGTFAKLI

SEQ ID NO: 92760 - protein, 84 aa, Pelagibaca abyssi
  misc_feature (1)..(84): tr|A0A1P8UR15|A0A1P8UR15_9RHOB Bifunctional isochorisma te lyase / aryl carrier protein OS=Pelagibaca abyssi OX =1250539 GN=Ga0080574_TMP1485 PE=4 SV=1
MTLHRPMTPLTKDDMRADIAQVLDVAPESIADGDSLLDHGLDSLRAMDLVTRWEARVPHLDYIDFFEVETLDEWWAVVERTRRA

SEQ ID NO: 92761 - protein, 177 aa, Pelagicola litorisediminis
  misc_feature (1)..(177): tr|A0A1Y5R6W4|A0A1Y5R6W4_9RHOB Putative isochorismatase OS=Pelagicola litorisediminis OX=1312363 GN=phzD PE=4 SV=1
MLTLNSASSDLLVIDFQTRLMPAIHDSDAVISNAFSLIEAARYLNLPLTYTEQNPEKLGHTLTKLAPYPGEVLHKMTFDALRTPKVAGHIDGTNAIVVAGCEAHVCVLQTVLGLIDAGRQVFVVADAVGSRTPQNRRAALERMARHGAEIVTTEMVIFEWLGSAEHPSFRDILKLVK

SEQ ID NO: 92762 - protein, 300 aa, Pelosinus fermentans
  misc_feature (1)..(300): tr|I8U5M6|I8U5M6_9FIRM Isochorismatase OS=Pelosinus fer mentans JBW45 OX=1192197 GN=JBW_01673 PE=4 SV=1
MAIPAISPYSMPMASDFPQNKVSWKANPKRSVLLIHDMQQYFLNAYTLGESPIIQLIENIQLLKAQCTELGIPVVYTAQPGDQRPEDRALLQDFWGPGLADDPSQTKVIDEITPNASDTVLTKWRYSAFKRTKLMEIMQEQGRDQLIICGVYAHIGCLLTACDAFMQDVETFFVCDAVADFSADHHKMAMTYAADRCAVTTSTTLLLDQLKSIQLSPNKAVTKASLHSLTQQLVRQQVAELLGETSSDIDDNEDLIDRGLDSIRIMSLVETWRSKGADVTFVKLAAGPTISAWWNLLSAK

SEQ ID NO: 92763 - protein, 183 aa, Peptoniphilus indolicus
  misc_feature (1)..(183): tr|G4D0U9|G4D0U9_9FIRM Isochorismatase OS=Peptoniphilus indolicus ATCC 29427 OX=997350 GN=HMPREF9129_0029 PE=4 SV=1
MKNFNLDRDKTLFLFIDVQDKLLNVMSNKEDVLKNTKILAQMAKIMNLESIFTAQYPKGLGFSNEELKSFLPEAKEIGKESFSCMLNDEFVEEFKSKDKKQIVVSGVESHICVLLTARDLIANGYEVFIASDAVGSRSDFNYKNALQMLSEMGCVITNTETIMFDLNSVAGTDEFKAIQKLIM

SEQ ID NO: 92764 - protein, 206 aa, Phaeospirillum molischianum
  misc_feature (1)..(206): tr|H8FWA7|H8FWA7_PHAMO Putative isochorismatase OS=Phae ospirillum molischianum DSM 120 OX=1150626 GN=phzA PE=4 SV=1
MNAIPTIEAYSLPKLNDLPANRAKWIPDPRRSVLLVHDMQHYFLRPLPESLRAELVGNAARLLQKCVEQGVQVAYTAQPGNMTNEQRGLLKDFWGPGMQASPADREIIEELRPRRDDWLLTKWRYSAFFHSDLLERMRAAGRDQIILCGVYAHIGVLISTVDAYSNDIQPFLVADAIADFSQKDHWMAMEYAARRCAMVITTDEAL

SEQ ID NO: 92765 - protein, 46 aa, Photobacterium aphoticum
  misc_feature (1)..(46): tr|A0A090QPJ8|A0A090QPJ8_9GAMM Isochorismatase OS=Photo bacterium aphoticum OX=754436 GN=JCM19237_2324 PE=4 SV= 1
MGDAHTTHDKDHATGEQIRTHHNATLPNITSFSVKIDVVSVASLIQ

SEQ ID NO: 92766 - protein, 187 aa, Photobacterium damselae
  misc_feature (1)..(187): tr|D0YY93|D0YY93_PHODD Isochorismatase OS=Photobacteriu m damselae subsp. damselae CIP 102761 OX=675817 GN=VDA_ 002256 PE=4 SV=1
MNKALIAIDFINDIVDAKGKIPSCAEQVKTHRVIDKANLAISWARNQHIPVIFVKVGFQDNYFAQPKHSPIFGKADQFGALNLSGWGTEFHCDLDVQPHDSVVIKPRVNPFYNTSLDAMLRANKIEQLYFCGVSTSWAIQSAVRDAHDRDYQVHLITDACASHSYEDHQASLAMLERLVTPHLAEEL

SEQ ID NO: 92767 - protein, 291 aa, Photorhabdus asymbiotica
  misc_feature (1)..(291): tr|C7BNH4|C7BNH4_PHOAA Isochorismatase OS=Photorhabdus asymbiotica subsp. asymbiotica (strain ATCC 43949 / 310 5-77) OX=553480 GN=phbB PE=4 SV=1
MSIPKLNSYDLPVAEELPTNKVNWSLDKNRAALLVHDMQNYFLNFWEENSPLINQVVANIARLVETCRENGIPVFYSAQPNQQSDEKRALLNDMWGPGLNCHPELQKITDMLVPQAGDTVMEKWRYSAFQRTDFEQQLKVAGRDQLIICGVYAHIGCLMTATDAFMRDIQPFMVADALADFSYEEHMMALKYTAGRCGRVETTEQLLIALNAKQVQWNKTRLKGLLLPLLDEDSGDIGDDENLLDYGLDSVRIMSLISHWRQQGYEVDFISLMKNPTVNGWMALFTEHQGA

SEQ ID NO: 92768 - protein, 291 aa, Photorhabdus australis
  misc_feature (1)..(291): tr|A0A1C0U9V9|A0A1C0U9V9_9GAMM Isochorismatase OS=Photo rhabdus australis OX=286156 GN=entB PE=4 SV=1
MSIPKLNSYDLPVAEGLPTNRVNWSLDKNRAALLVHDMQNYFLNFWEENSPLINQVVANIARLVETCRENGIPVFYSAQPNQQSDEKRALLNDMWGPGLNWHPELQKITDALAPQAGDTVMDKWRYSAFQRTDFEQQLRISGRDQLIICGVYAHIGCLMTATDAFMRDIQPFMVADALADFSYEEHMMALKYTAGRCGRVETTEQLLAALNAKQVQWNKTRLKGLLLPLLDGDSGDIGDDENLLDYGLDSVRIMSLISHWRQQGYEVDFISLMKNPTINGWITLFTEHQGA

SEQ ID NO: 92769 - protein, 291 aa, Photorhabdus khanii
  misc_feature (1)..(291): tr|W3V3Q2|W3V3Q2_9GAMM Isochorismate hydrolase OS=Photo rhabdus khanii NC19 OX=1004151 GN=PTE_04188 PE=4 SV=1
MSIPKLNSYDLPVAEGLPTNKVNWSLDKNRAALLIHDMQNYFLNFWEENSPLINQVVTNIARLIEICRENGIPVFYSAQPNQQSDEERALLNDMWGPGLNCHPELQKITDALAPQAGDIVMDKWRYSAFQRTDFEQQLKIAGRDQLIICGVYAHIGCLMTATDAFMRDIQPFMVADALADFSYEEHMMALKYTAGRCGRVETTEQLLVALDVKQVQWNKTRLKALLLPLLDEDSDDIGDDENLLDYGLDSVRIMSLISHWRQQGYEMDFISLMKNPTINGWMTLFTERQGA

SEQ ID NO: 92770 - protein, 214 aa, Photorhabdus luminescens
  misc_feature (1)..(214): tr|A0A022PGZ1|A0A022PGZ1_PHOLU Isochorismate hydrolase OS=Photorhabdus luminescens BA1 OX=1393736 GN=BA1DRAFT_ 02653 PE=4 SV=1
MTIPSLKNYKLPQPKDFPGNKASWLLEPHKAILLIHDMQDYFLQFFGNNSPLVNKLIENIHLLKLFCKEKEIPIIYTAQPKVQSDEERALLNDIWGAGLNRSPHLQHISHALAPNNDDIVIVKWRYSAFQRSSLEENIKELGRDQLIICGVYGHIGCMITAVDAFMRDIKPFLVGDAIADFTLEDHLMALKYVAEKSGMVMSTKEIISSVNFDK

SEQ ID NO: 92771 - protein, 76 aa, Photorhabdus namnaonensis
  misc_feature (1)..(76): tr|A0A1B8YE04|A0A1B8YE04_9GAMM Isochorismatase OS=Photo rhabdus namnaonensis OX=1851568 GN=dhbB PE=4 SV=1
MKNQLIHEILHREIRALHPEVETIPEDENLFDIGFDSVKMLMLVDRLNDAGYPINFADLARWPTINDWIKLLAKDE

SEQ ID NO: 92772 - protein, 291 aa, Photorhabdus temperata
  misc_feature (1)..(291): tr|A0A081S276|A0A081S276_PHOTE Isochorismate hydrolase OS=Photorhabdus temperata subsp. temperata Meg1 OX=1393 735 GN=MEG1DRAFT_00419 PE=4 SV=1
MSIPKLNSYDLPVAEGLPTNKVNWSLDKNRAALLIHDMQNYFLNFWEENSPLINQVVTNIARLIEICRENGIPVFYSAQPNQQSDEERALLNDMWGPGLNCHPELQKITDTLAPQAGDIVMDKWRYSAFQRTDFEQQLKIAGRDQLIICGVYAHIGCLMTATDAFMRDIQPFMVADALADFSYEEHMMALKYTAGRCGRVETTEQLLVALDVKQEQWNKTRLKALLLPLLDEDSDDIGDDENLLDYGLDSVRIMSLISHWRQQGYEMDFISLMKNPTINGWMALFTERQGA

SEQ ID NO: 92773 - protein, 187 aa, Phycisphaerae bacterium
  misc_feature (1)..(187): tr|A0A518LMH6|A0A518LMH6_9BACT Vibriobactin-specific is ochorismatase OS=Phycisphaerae bacterium RAS2 OX=252803 5 GN=vibB PE=4 SV=1
MPHANMLEADLTALVVIDVQEKMLSAISSSTPDALVARMAVLVKTARLLDVPVIFTEQYPRGLGSTDAGLVETLAGATGPLEKTTCSCWRDEGFRAALQATEREHVILCGVETHVCIQQTALDLLRVDYVPFVPADAVGSRRPVDYQTALDRMRSAGVVVSTVESLMFELIERCDHPRFKEFLKLVK

SEQ ID NO: 92774 - protein, 283 aa, Phytobacter ursingii
  misc_feature (1)..(283): tr|A0A508UCN1|A0A508UCN1_9GAMM Isochorismatase OS=Phyto bacter ursingii OX=1972431 GN=entB PE=4 SV=1
MAIPKLTGYALPTANDIPDNKVQWAFEPDRAALLIHDMQEYFLHFWGENCPMMEKVVANIAALRQFCKQHHIPVYYTAQPKDQSDDDRALLNDMWGPGLTRSPEQQQIVAALAPDEADTVLVKWRYSAFHRSPLEQMLKETGRNQLIITGVYAHIGCMTTATDAFMRDIKPFMVADALADFSREEHLMSLKYVAGRSGRVVMTEALLTVPASKAALRALILPLLDESDEPYDDENLIDYGLDSVRMMALAARWRKVHGDIDFVMLAKNPTIDAWWTLLSREAN

SEQ ID NO: 92775 - protein, 210 aa, Phytophthora sojae
  misc_feature (1)..(210): sp|G4YEI5|ISC1_PHYSP Secreted isochorismatase effector Isc1 OS=Phytophthora sojae (strain P6497) OX=1094619 GN =Isc1 PE=1 SV=1
MAALSSATKRLGRLIPHSSVLFVCDVQEVFRGLTFQLPTVIHGTNTMVSAAKLLNVPVVVTTQYGSRLGSTVSEISKNLEDAPDVKVFDKMKFSMLVPEVERHLTTNMPQRKSVLLCGIETHVCVLQTCLDLLDKGYDVHVVSDAVSSSTSYNRSMALERIRQSGAYITSVESAIFQLANDAGNPEFKSISKLIKEHLKVQNGFDTGARI

SEQ ID NO: 92776 - protein, 191 aa, Picrophilus torridus
  misc_feature (1)..(191): tr|Q6L1E6|Q6L1E6_PICTO Isochorismatase OS=Picrophilus t orridus (strain ATCC 700027 / DSM 9790 / JCM 10055 / NB RC 100828) OX=263820 GN=PTO0621 PE=4 SV=1
MRYPGVEKSIIIFINNDMEFFNNIFSKMEIIMALDYINHFVEKYKIPVISTRRPINYSTSNPELMEFKMEVDKRRLMGKVPESPMDKKFADDFTLKRLTGDDYSVFKEDIFYKTNLDKIIKEQNKIDLLLCGFFTDTDVFISAVSAYIKEFNVYIISDATSTYSERLYFQSLEMLSYFGTVIDTRDMEKYF

SEQ ID NO: 92777 - protein, 123 aa, Piscirickettsia salmonis
  misc_feature (1)..(123): tr|A0A095BEZ9|A0A095BEZ9_PISSA Isochorismatase OS=Pisci rickettsia salmonis OX=1238 GN=KU39_3010 PE=4 SV=1
MSLNQVNVLEACKSASVLWKNSFNNQDASGCAQQYSEGATMLAKPFGVFEGREQIQLFWQGIIDQGFNNVEYHDTEWLKEGEDGYLLTSKWSMNKAHGLIHKEHWRIQADGAALLEYDEFEVL

SEQ ID NO: 92778 - protein, 202 aa, Planctomyces sp.
  misc_feature (1)..(202): tr|A0A142WZ23|A0A142WZ23_9PLAN Isochorismatase OS=Planc tomyces sp. SH-PL14 OX=1632864 GN=entB PE=4 SV=1
MPHTNPDLHGSAPDKCDTALLLIDVINALDFPEADQLLPFAVPMADRIAALKRRAQAEGVPVIYVNDNFGRWRSDFRALVTHCRRPESRGREIVERLLPDDDDYFILKPKHSGFYSTALDTLLDYLGTRRILLTGVAGNICVLFTANDVYMRDLELVVPADCVASNTAEDNDYALAQMRTILKADTRPSDQIPMRSRPSAHC

SEQ ID NO: 92779 - protein, 178 aa, Planctomycetes bacterium
  misc_feature (1)..(178): tr|A0A1V6DAH0|A0A1V6DAH0_9BACT Vibriobactin-specific is ochorismatase OS=Planctomycetes bacterium ADurb.Bin126 OX=1852903 GN=vibB PE=4 SV=1
MLKPQETVLVLVDLQARLVPAMHEREALIQSAVRLVRGAQVLEVPILHTEQNPAGLGPTVEEIASLLTGSPLTKRAFSCCGEQDFLDALQSVGRRHVLLAGIETHVCVYQTAVDLLAAGYDVQVVGDIVSSRTQANRTVGLTRMAAAGAGVTSVETALFELLGRAEGPKFKEILAIVK

SEQ ID NO: 92780 - protein, 186 aa, Unknown
  misc_feature (1)..(186): tr|A0A484QG66|A0A484QG66_9ZZZZ Isochorismatase OS=plant metagenome OX=1297885 GN=ANDO1_3220 PE=4 SV=1
MPAWLDAEDSVFLIVDMQERLMPAIAGQAEQLATADRLARAARLLDIPVVATAHQAAKLGGTVAPLAASVRRTFPKTHFSAAREPGFVAWLPAARRTVLVAGAEAHVCVLQTVLGLLAEGLRVAMVEDAVGSRHAADKAAALRRAAGAGADIVTAEMVLFEWLGHCEHPQFPAVLALIKERAAPGV

SEQ ID NO: 92781 - protein, 240 aa, Plautia stali
  misc_feature (1)..(240): tr|U3TSC4|U3TSC4_9ENTR Isochorismatase OS=Plautia stali symbiont OX=891974 GN=E05_19440 PE=4 SV=1
MAIPKLTSYALPAATELPANKVQWALEPQRAALLIHYMQAYFLNFWGEDSPLVNQVVENIARLRAYCKAQGIPVFYTAQPNQQSDEDRALLNDMWGPGLNKHPDQQKIVDALALESILQEMGRDQLIITGVYAHIGCLTTATDAFMRNIQPFMVADALADFSRDEHMMALTYTAGRSGKVVMTADLMPLPQSKDALRTLILPLLEDDDVPEDDENLIDYGLDSVRVMALAARWRDCHHRL

SEQ ID NO: 92782 - protein, 405 aa, Pluralibacter gergoviae
  misc_feature (1)..(405): tr|A0A379D3U8|A0A379D3U8_PLUGE Isochorismatase OS=Plura libacter gergoviae OX=61647 GN=entB_1 PE=4 SV=1
MMQAVVANIKALRDFAKRHDMPVYYTAQPKEQSDEDRALLNDMWGPGLTRSPEQQQIVADLAPDADDTVLVKWRYSAFHRSPLEQSLKETGRDQLIITGVYAHIGCMTTATDAFMRDIKPFFVADALADFSREEHLMSLKYVAGRSGRVVMTEDLLTLPSSKAALRAAILPLLDESDEPMDDENLIDYGLDSVRMMSLAARWRKVHADIDFVVLAKNPTIDAWWALLSPRGEVMAGFDFHGRRVWVTGAGKGIGYATALAFAEAGAEVVGFDLQFDKADYPFTTEVLDVADAGQVAETCRRLLAATPRLDVLVNAAGILRMGATDVISVDDWQQTFAVNVGGAFNLFQQTMAQFRQQRGGAIVTVASDAAHTPRIGMSAYGASKAALKSLALTVRSGAGGQRRAL

SEQ ID NO: 92783 - protein, 207 aa, Polaromonas sp.
  misc_feature (1)..(207): tr|A0A068YTK6|A0A068YTK6_9BURK Isochorismatase OS=Polar omonas sp. CG9_12 OX=1504672 PE=4 SV=1
MLLDADDSQLVLIDYQTRLMPVIFENEIVVANALRLARMARILEVPVWGTAQNPDKLGQNLPELQAAIDSAGGKTMAKMHFSAAADGLVEWLRPPVRKAPTGGNARSLPKHLQKPAEPEDAGRSMIVMAGCEAHVCLMQTALELLEEEFDVWVVTDACSSRSERNRDAAFDRLAGNGAELVTTEMVAFEWARTCEHGAFRELLALVK

SEQ ID NO: 92784 - protein, 188 aa, Prochlorococcus marinus
  misc_feature (1)..(188): tr|A0A0A1ZHX6|A0A0A1ZHX6_PROMR Isochorismatase OS=Proch lorococcus marinus str. GP2 OX=59925 GN=EU91_0133 PE=4 SV=1
MNDQEISSDKLSPKVNALLIIDIQGKIMRTIFNKDSIIKNIKRLLSAYQILEENIFISEQNPLKLGVTIPELSPIAEFRKFEKMEFSLAKLEEFLKELKNKKITNLIVCGIETHICIQQTVLDFLQKGFEVILISDAMGSRNRVDHEIALQRMTQSGAILTTTESMIFELCKTADRKEFKEIKNIIMS

SEQ ID NO: 92785 - protein, 181 aa, Prochlorococcus sp.
  misc_feature (1)..(181): tr|A0A0A2BIZ2|A0A0A2BIZ2_9PROC Isochorismatase OS=Proch lorococcus sp. MIT 0601 OX=1499498 GN=EV05_1807 PE=4 SV =1
MSQQNTALIIIDVQEKLVTSIENKELIMWNINRLIDACKIFNMKIYVTEQNPEKLGKTIEQINKCLDFQAYKKMSFSSFHCKDLSRELKSNAFENIIICGIESHVCIMQSALDYINSGKNIFIPVDSIGSRRTIDHETSLQRLSMSGAIVTTTETAIFELCKSADFEDFKAVSSIIKRKME

SEQ ID NO: 92786 - protein, 231 aa, Propionibacterium freudenreichii
  misc_feature (1)..(231): tr|A0A0A8PA64|A0A0A8PA64_9ACTN Isochorismatase hydrolas e OS=Propionibacterium freudenreichii OX=1744 GN=PFCIRM 512_11620 PE=4 SV=1
MAKLDPEPIRDPQADQLLTPQNSVVVLIDFQPGQYATVGSVSREEIDLGVVTLAKLAHTYDIPTVVSTVAVGMGVNAPTVPQIMNELPGVDQIDRTGVNAWEDPEFRAAIEATGRRKIIMAGLWTEVCLAFPALDMIEAGYEIYPRGRRRGRCQPGDQRPRLRPDDPGRRAPDHRPGPRLRTDAQLGAPRHRRLPPHLQLVLPPAAQPWPARRQDPALGRTLIRPTPAPLS

SEQ ID NO: 92787 - protein, 300 aa, Propionispora sp.
  misc_feature (1)..(300): tr|A0A0K8JDI1|A0A0K8JDI1_9FIRM Isochorismatase OS=Propi onispora sp. 2/2-37 OX=1677858 GN=dhbB PE=4 SV=1
MAIPAILPYSLAFAAELPQNRVSWKAEADRSVLLIHDMQQYFLAAYQSENSPLAELLRNIQLLKKQCKELGIPVIYTVQPGAQKPEDRALLRDFWGPGLADEPEQTKIADAIAPDDQDIVLTKWRYSAFKRTRLLEIMRGQGRDQLIICGVYAHIGCLLTAGDAFMQDLETFFVGDAVADFSLDHHRIAINYAAGCCSFVTSTELVLSQLTDNRSFFGVVEDNSTQPLTLQRVRKQVAELLGETAADLTDHESLVDRGLDSIRMMSLVEQWRRISTDITFIKLAKEPTIYSWWELLSAKK

SEQ ID NO: 92788 - protein, 182 aa, Proteiniborus sp.
  misc_feature (1)..(182): tr|A0A1M4M1U9|A0A1M4M1U9_9FIRM Isochorismatase family p rotein OS=Proteiniborus sp. DW1 OX=1889883 GN=entB1 PE= 4 SV=1
MDKFTLKQEEAVLMIIDIQERLVPAMKYGKKVIYNTNILISAAQKMHIPVIGTEQYPKGLGSTVSEISVNIDKDLIYEKMSFTGYTEEVKQALKSIGRKKVIITGMETHVCVFQTARDLLEDGYQVFIAEDAVCSRTKENYKNGLSLMDKMGAVISNTETIVFDLLKVSGTPVFKELSKLIK

SEQ ID NO: 92789 - protein, 191 aa, Providencia heimbachae
  misc_feature (1)..(191): tr|A0A1B7JHS8|A0A1B7JHS8_9GAMM Isochorismatase OS=Provi dencia heimbachae ATCC 35613 OX=1354272 GN=M998_3685 PE =4 SV=1
MSQALIIIDLIEDIIGKNGLSNSSYQQTQARHIVEQANIAANYARSNNIPVIWVKVGFSDDYQDIPAGSPMFQQAKKNGALKLSGNGCSWVQDLEVHFRDPIMVKKGVSAFTGNKLNKWLIDNEITQLYLGGVSSLMAIQSSARQAHDLGYSVTVLEDLCAAATLELHEQSMQALQGMAKISSIKEFMQTK

SEQ ID NO: 92790 - protein, 203 aa, Pseudoalteromonas distincta
  misc_feature (1)..(203): tr|F3BFQ9|F3BFQ9_9GAMM Isochorismatase OS=Pseudoalterom onas distincta OX=77608 GN=PH505_af00040 PE=4 SV=1
MDDLSTTALVLIGFQNDYFSPKGILYDVVEESSRITGVVENTVSLLTSCAKHFALVVNTPIHFTQNYSELKNPIGILKVIADVGAFKAGSYGAQTIEQLDPFNNIIEVVPGKRGLNAFTHTALASKLKKHGVTNIILAGTVTSICIDSTARTAVELGFNVVILSDCTSSRTPFEQTFYCEEVFPLYASVCESDTFIKHWRGHG

SEQ ID NO: 92791 - protein, 181 aa, Pseudoalteromonas sp.
  misc_feature (1)..(181): tr|A0A1R4JA90|A0A1R4JA90_9GAMM Isochorismatase OS=Pseud oalteromonas sp. JB197 OX=1434839 GN=CZ797_05570 PE=4 S V=1
MSNVDALRSVLLIIDIQTKLEPAIADFSAILKCSLQLSQASLVHKIPTLITEQYKKGLGATNQTLQDALPQADYFHKTHFSACAEPGFLAQLAKYTRPQVVVIGTEAHVCVLQTCLDLLQYGYEVIIAVDAIGSRNDNHKIIATEQLRQAGAIISSTESIIFQWTKQAATPNFKKILPIIK

SEQ ID NO: 92792 - protein, 144 aa, Pseudomonas aeruginosa
  misc_feature (1)..(144): tr|V6AH38|V6AH38_PSEAI Putative isochorismatase OS=Pseu domonas aeruginosa MH27 OX=1306165 GN=phzA PE=4 SV=1
MSGIPEITAYPLPTAQQLPANLARWSLEPRRAVLLVHDMQRYFLRPLPESLRAGLVANAARLRRWCVEQGVQIAYTAQPGSMTEEQRGLLKDFWGPGMRASPADREVVEELAPGPDDWLLTKWRYSAFFHSDLLQRMRAAGRDH

SEQ ID NO: 92793 - protein, 207 aa, Pseudomonas chlororaphis
  misc_feature (1)..(207): sp|Q51518|PHZA_PSECL Probable isochorismatase OS=Pseudo monas chlororaphis OX=333 GN=phzA PE=3 SV=1
MTGIPSIVPYALPTNRDLPVNLAQWSIDPERAVLLVHDMQRYFLRPLPDALRDEVVSNAARIRQWAADNGVPVAYTAQPGSMSEEQRGLLKDFWGPGMKASPADREVVGALTPKPGDWLLTKWRYSAFFNSDLLERMRANGRDQLILCGVYAHVGVLISTVDAYSNDIQPFLVADAIADFSKEHHWMAIEYAASRCAMVITTDEVVL

SEQ ID NO: 92794 - protein, 197 aa, Pseudomonas entomophila
  misc_feature (1)..(197): tr|Q1ID69|Q1ID69_PSEE4 Putative isochorismatase OS=Pseu domonas entomophila (strain L48) OX=384676 GN=PSEEN1524 PE=4 SV=1
MSSVPTTMFRLTGRDYPPAKLGQASLIVIDAQKEYLSGPLALSGMDEAVANIVRLLDAARKANRPIIHVRHLGTVGGRFDPQGPGGEFIPGLEPLEGEVVIEKRMPNAFKNTKLHETLQAFGPLDLIVCGFMSHSSVSTTVRRAKDYGYRCTLVEDASATRDLALKDTVISAAQIHQCEMAVMADNFACVAPTASLV

SEQ ID NO: 92795 - protein, 215 aa, Pseudomonas fluorescens
  misc_feature (1)..(215): tr|G8Q5F3|G8Q5F3_PSEF3 Isochorismatase family OS=Pseudo monas fluorescens (strain F113) OX=1114970 GN=PSF113_31 46 PE=4 SV=1
MASENIRNPQTDQLLSPENSALIIIDYQPIQVSSIRSMSRDELVFNITSVAKAAVNYNLPIIHSTVNVATGRNKPPIQELQDVLGHLPTYDRTSINSWEDTEFKQAVKAIGRRKLIMTALWTEACLTFPVLDAIQEGYEVYVPVDAVGGTSLAAHEAALRRMEQAGAKLISRVQMYCELQRDWARALTVPGFMGVFENFDGFNAEKAMEVRAKNA

SEQ ID NO: 92796 - protein, 185 aa, Pseudomonas furukawaii
  misc_feature (1)..(185): tr|L8MGW7|L8MGW7_PSEFK Isochorismatase OS=Pseudomonas f urukawaii OX=1149133 GN=ppKF707_0022 PE=4 SV=1
MSKQALVVVDIQNDYFPGGLWTLTGADAAADNAARLIADARRRGELVVHIRHEFPTQDAPFFRPGSEGAQLHPKVANLAEEPVVLKHYINSFRETELKAVLDRHGIERLTVVGNMSHMCVDGITRAAVDFGYPVTVIHDACATLDLEFNGTRVPAAQVHAAFMAALAFGYAQVVSTEQFLAGQAA

SEQ ID NO: 92797 - protein, 186 aa, Pseudomonas orientalis
  misc_feature (1)..(186): tr|A0A3G7X6J0|A0A3G7X6J0_9PSED Isochorismatase OS=Pseud omonas orientalis OX=76758 GN=C4J97_4863 PE=4 SV=1
MAKQALILIDIQNDYFPQGKWPLDGVEAAADNAAQVLQAFRQAGDAVIHVRHEFADDDAPFFTPGSEGANLHAKVLNQGNEPVVLKHFVNAFRQTNLRQLLEQRSITDVVVVGSMSHMCIDAVVRAAADLGYKVTVIHDACATRDQEFNGQVIPAAQVHGAYMASLAFGYAGVVSTDEYLKTQAAA

SEQ ID NO: 92798 - protein, 231 aa, Pseudomonas pseudoalcaligenes
  misc_feature (1)..(231): tr|W6RJ15|W6RJ15_PSEP5 Isochorismatase hydrolase OS=Pse udomonas pseudoalcaligenes (strain CECT 5344) OX=118259 0 GN=BN5_3203 PE=4 SV=1
MTLSERFLVSEPYPWPYNGQLQPANTALIIIDMQTDFCGEGGYVDTMGYDLAAVRAPIEPINRVLKVMREQGFHIIHTREGHRPDLSDLPANKRWRSQRIGAGIGDAGPCGRILVRGEPGWELIPELQPLAGEVIIDKPGKGSFCATDLELILRTRGIENLILCGITTDVCVHTTMREANDRGFECLLLEDCCGATDPGNHLAALHMVKMQGGVFGAVSDSASLVELLSEH

SEQ ID NO: 92799 - protein, 196 aa, Pseudomonas putida
  misc_feature (1)..(196): tr|A0A379KDG5|A0A379KDG5_PSEPU Isochorismatase OS=Pseud omonas putida OX=303 GN=phzD PE=4 SV=1
MSVPTTMFRLTGRDYPPAKLSQASLIVIDAQKEYLSGPLALSGMDEAVANIARLLDAARKAGRPIIHVRHLGTVGGRFDPQGPAGEFIPGLEPHDGEIIIEKRMPNAFKNTKLHETLQELGHLDLIVCGFMSHSSVSTTVRRAKDYGYRCTLVQDASATRDLALKDRVIPAAQIHECEMAVMADNFACVAPTASLI

SEQ ID NO: 92800 - protein, 188 aa, Pseudomonas savastanoi
  misc_feature (1)..(188): tr|Q48KJ6|Q48KJ6_PSE14 Isochorismatase family protein O S=Pseudomonas savastanoi pv. phaseolicola (strain 1448A / Race 6) OX=264730 GN=PSPPH_1848 PE=4 SV=1
MGIQDNGALILIDMQQGINHPKLGRRNNPQAEANIGALLSAWRQSGRPVIHVRHFSTSPQSVFWPEQSGVEYQSAFLPHADERELSKQVPDAFCGSFLEMWLRSDGIGQVVIVGVITNNSVESTARSGGNLGFDVLVAHDACFTFDQQDFFGTPRSAEDVHAMSLANLHGEYATVLSTAQILQQVAVE

SEQ ID NO: 92801 - protein, 210 aa, Pseudomonas sp.
  misc_feature (1)..(210): tr|A0A2N7R0Z9|A0A2N7R0Z9_9PSED Putative isochorismatase OS=Pseudomonas sp. AD21 OX=396378 GN=phzD_3 PE=4 SV=1
MSTATYNRLNKDDAVVLLVDHQTGLISLVQDFSPNEFKNNVLALADLAKFFNLPTILTTSFEQGPNGPLVPELKEMFPDAPYIARPGQINAWDNEDFVKAIKATGRKQIIIAGVVTDVCVAFPTLSALAEGFDVFVVTDASGTFNTTVQQAAWSRMTQAGAQMMNWFSVACELHRDWRNDIEGLGNLLSQRIPNYRNLMNSYSAITAAQK

SEQ ID NO: 92802 - protein, 289 aa, Pseudomonas stutzeri
  misc_feature (1)..(289): tr|A0A379LB45|A0A379LB45_PSEST Isochorismatase OS=Pseud omonas stutzeri OX=316 GN=entB PE=4 SV=1
MAIPTLLPYSLPSEWSADKVQWSVDPARAVLLIHDMQAYFCDFWGEDSPFVAALVQRLARVRECCRALGIPVVYTAQPGEQSAAERALLTDVWGPGITQHPQRQAIVPGLTPAADDTLLVKWRYSAFQRSPLEHMMRELGRDQLIIGGIYGHIGCLMTACDAFMRDIQPFLLADGIADFSQAEHRMALDYVATRCGRVITCNELLSLRPAPASLTRESLQARLLTMLDEMDEPFDPDENLLDYGLDSIQIMTLLSEWREQGLELSFTDLAKTPTLNGWWALIGEHGGAR

SEQ ID NO: 92803 - protein, 207 aa, Pseudomonas synxantha
  misc_feature (1)..(207): tr|A0A0E3KE85|A0A0E3KE85_9PSED Isochorismatase of sider ophore biosynthesis OS=Pseudomonas synxantha OX=47883 G N=VO64_0337 PE=4 SV=1
MTGIPSIVPYALPTSLDLPANLAQWHIDPERAVLLVHDMQRYFLRPLPDALRDEVVGNAARIRQWAADNGVPVAYTAQPGSMNEAQRGLLKDFWGPGMKASPTDREVVDALAPQPGDWLLTKWRYSAFFNSDLLQRLHASGRDQLILCGVYAHVGVLISSVDAYSNDIQPFLVADAIADFSKEHHWMAMEYAASRCAMVITTDEVVL

SEQ ID NO: 92804 - protein, 228 aa, Pseudomonas syringae
  misc_feature (1)..(228): tr|S3MBX1|S3MBX1_PSESY Isochorismatase family protein O S=Pseudomonas syringae pv. syringae SM OX=1262350 GN=Ps sSM_1146 PE=4 SV=1
MSERHIASAPYPWPWNGQLHAHNTALIVIDMQTDFCGVGGYVDSMGYDLALTRAPIEPIKALLAAMRPLGFTIIHTREGHRPDLSDLPANKRWRSQRIGAGIGDPGPCGKILVRGEPGWEIIDELAPLPGEIVLDKPGKGSFCATDLELILRTRGIDNLILTGITTDVCVHTTLREANDRGFECLLLEDCCGATDPGNHAAALSMVKMQGGVFGAVGHSSMLRDLLGA

SEQ ID NO: 92805 - protein, 229 aa, Pseudomonas xanthomarina
  misc_feature (1)..(229): tr|A0A098FPS0|A0A098FPS0_9PSED Isochorismatase hydrolas e OS=Pseudomonas xanthomarina OX=271420 GN=PXNS11_19003 7 PE=4 SV=1
MSERFLTSEPYPWPYNGQLHPANTALVIIDMQTDFCGEGGYVDTMGYDLAAVRAPIEPIGRVLKIMREQGFHIIHTREGHRPDLSDLPANKRWRSQRIGAGIGDTGPCGRILVRGETGWELIPELQPLDGEVIIDKPGKGSFCATDLELILRTRGIENLILCGITTDVCVHTTMREANDRGFECLLLEDCCGATDRGNHLAAVHMVKMQGGVFGAVSDSVSLVALLNEH

SEQ ID NO: 92806 - protein, 207 aa, Pseudomonas yamanorum
  misc_feature (1)..(207): tr|A0A143GHN4|A0A143GHN4_9PSED Isochorismatase of sider ophore biosynthesis OS=Pseudomonas yamanorum OX=515393 GN=AK972_2556 PE=4 SV=1
MTGIPSIVPYALPTSRDLPVNLAQWRIDPERAVLLVHDMQRYFLRPLPDALREAVVGNSARIRQWAVDHGVPVAYTAQPGSMSEEQRGLLKDFWGPGMKASPTDREVVDALTPKSGDWLLTKWRYSAFFHSDLLERMRATERDQLILCGVYAHVGVLISTVDAYSNDIQPFLVADAIADFSKEHHWMAIEYAASRCAMVITTDEVVL

SEQ ID NO: 92807 - protein, 78 aa, Pseudonocardia autotrophica
  misc_feature (1)..(78): tr|A0A1Y2NA56|A0A1Y2NA56_PSEAH Isochorismatase OS=Pseud onocardia autotrophica OX=2074 GN=dhbB_1 PE=4 SV=1
MTVSPAEDRVRADVAALLGCDPATIGPDDDLLDLGLDSVRIMSLVERWRADGAPDLNFPDLAEEPVLRRWAELLRDAR

SEQ ID NO: 92808 - protein, 69 aa, Pseudonocardia sp.
  misc_feature (1)..(69): tr|A0A1Q8JEB1|A0A1Q8JEB1_9PSEU Isochorismatase OS=Pseud onocardia sp. Ae356_Ps1 OX=1885032 GN=Ae356Ps1_0432 PE= 4 SV=1
MVLPHTAHATYDVPPGPGPSEGVPAFLAARAAEWSLGDAIEIVADPTAVHFHPAPSVNSRTERVDTWFS

SEQ ID NO: 92809 - protein, 176 aa, Pseudothermotoga hypogea
  misc_feature (1)..(176): tr|V9NIB7|V9NIB7_9THEM Isochorismatase OS=Pseudothermot oga hypogea OX=57487 PE=4 SV=1
MCRACFIVDRFAERFCGTGGALYFPGAESVLPPVLDLVKKYREQSLPIITTQDWHEENDAEFQIWPKHCVKDGAGAELVKALKESLSGYEKHLTVRKTRYSAFYGTNFEEIIESYGIDEVEVCGVVTHICVLFTVEELRNRGIRTIVRKDAVASYDEGFHACALKLMREVLRAEVI

SEQ ID NO: 92810 - protein, 182 aa, Psychrobacter aquaticus
  misc_feature (1)..(182): tr|U4T6H8|U4T6H8_9GAMM Isochorismatase OS=Psychrobacter aquaticus CMS 56 OX=1354303 GN=M917_2502 PE=4 SV=1
MNKQALIVVDIQNEYFPQGELALVGINEAADNAALVIASARQKGHTVIHIRHEMPSTDAPIFTPNTDGVEINEKVKPIEGETVITKHYSNSFRETALKELLDKEGIKEVTVIGAMSHMCVDATVRAAVDFGYTTTTVHDACATLDLEFNGTTVPAAQAHATIMAAIEFLYGEVVDTQTWIAL

SEQ ID NO: 92811 - protein, 201 aa, Psychrobacter arcticus
  misc_feature (1)..(201): tr|Q4FVP0|Q4FVP0_PSYA2 Probable isochorismatase hydrola se OS=Psychrobacter arcticus (strain DSM 17307 / 273-4) OX=259536 GN=Psyc_0044 PE=4 SV=1
MSIPSTLLGLSGGQFNEIDWSNCAIVMIDFQNEYVDGAMPLGDAGNKATANARLLLYKARNKNIPIFHVAHHGQDNDKIFNPLSSKVDIIDSLQPLDDEKTIIKMHPNAFYDTELQALITSAGKQQIIFAGFMSHMCVSSSVRAAFDLGFESFVCHDACATRDLPSVAGQVITASTVHDSAMAALQDRFAALVATDKLTNS

SEQ ID NO: 92812 - protein, 192 aa, Psychrobacter sp.
  misc_feature (1)..(192): tr|F5STQ6|F5STQ6_9GAMM Isochorismatase OS=Psychrobacter sp. 1501(2011) OX=1002339 GN=HMPREF9373_2440 PE=4 SV=1
MSTTITTDKTYRIQRENCQAMIIDVQEKLSPHIYRYNDILKKTLILIQGLQVLDIPILLNEQYPEGLGRTVPEIMAVLDATKSKTIEKVTFSACDNDETWNYLAQQNRISVLVFGVEAHVCVMQTVLDLLDNGMQPVVIADAIGSRSAYDRRQAIRRMRRAGAVITTTEAILFELCRSSKDPVFKAISQLVK

SEQ ID NO: 92813 - protein, 210 aa, Puniceibacterium sp.
  misc_feature (1)..(210): tr|A0A0J5QDS3|A0A0J5QDS3_9RHOB Isochorismate hydrolase OS=Puniceibacterium sp. IMCC21224 OX=1618204 GN=IMCC212 24_111855 PE=4 SV=1
MAIPRIAAYDLPKAEDLPIPRAPWRFDPSRAALLVHDMQGYFCAAYDRDAAPLAPVIANIARLAAACRVAGIPVFYTAQHGDQDRRDRGLQADLWGPGMSETPEHVDILPELAPQAGDIRLLKHRYSAFQRSNLDSLMRVRNRDQLIITGIYAHIGCLATAAEAFQRDIEPFFVADALADFSRDRHDMAVDWIAACCGVPVMTEALVSQF

SEQ ID NO: 92814 - protein, 201 aa, Pyrobaculum oguniense
  misc_feature (1)..(201): tr|H6Q8H9|H6Q8H9_PYROT Amidases related to nicotinamida se OS=Pyrobaculum oguniense (strain DSM 13380 / JCM 105 95 / TE7) OX=698757 GN=Pogu_0959 PE=4 SV=1
MLPESVKVPRVSIVDKVSLPAKKSAVVVVDMQNDFAHPNGKLYGPAAREIIPRIASLLEKARRAGVRVVYTQDTHYPDDPVEFPIWGPHVVKGTWGWQIVDELKPREGDIVIEKMRYDAFFGTPMDHVLRMYGIQHLVVTGTVANICVLHTVASARLRLYDVVVPIDAIAALNEFDYAAALRQMDFLYKVTLTTTEGVEFV

SEQ ID NO: 92815 - protein, 197 aa, Ralstonia solanacearum
  misc_feature (1)..(197): tr|D8NEL1|D8NEL1_RALSL Putative isochorismatase hydrola se OS=Ralstonia solanacearum CMR15 OX=859655 GN=CMR15_m p20424 PE=4 SV=1
MSEPFQLEPAKSALLVMDYQNVLLEHYVPEDQRAGVLANTARMIVAARAAHMPVIYVMVAFRQGYPEVSARNRLFSLVKQSGAFGRGQAETAIHPAVAPLDNEPVVIKHRIGAFTGTALETLLRSNGIETLVLAGVTTAGVVLSTVRQALDLDYRVVVARDGCADPDHDLHLVLLDKVIAQHAEVVFAQRVVDALPA

SEQ ID NO: 92816 - protein, 283 aa, Raoultella electrica
  misc_feature (1)..(283): tr|A0A514EV13|A0A514EV13_9ENTR Isochorismatase OS=Raoul tella electrica OX=1259973 GN=entB PE=4 SV=1
MAIPQLQAYALPEASDIPVNKVNWAFEPSRAALLIHDMQEYFLNFWGEDSAMMAKVVANIAALREFCKRNNIPVFYTAQPKEQSDEDRALLNDMWGPGLTRSPEQQRVIAALAPDEHDTVLVKWRYSAFHRSPLEERLKESGRDQLIITGVYAHIGCMTTATDAFMRDIKPFFIADALADFSREEHLMSLKYVAGRCGRVVMTEELLPLPASKTALRALVLPLLDESDEPMDDENLIDYGLDSVRMMALAARWRKVHGDIDFVMLAKNPTIDAWWALLSREVK

SEQ ID NO: 92817 - protein, 283 aa, Raoultella ornithinolytica
  misc_feature (1)..(283): tr|A0A1Y6GRA4|A0A1Y6GRA4_RAOOR Isochorismatase OS=Raoul tella ornithinolytica OX=54291 GN=entB PE=4 SV=1
MAIPELQAYTLPEASDIPANKVNWAFEPSRAALLIHDMQEYFLNFWGEDSAMMAKVVANIAALRDFCKQHNIPVFYTAQPKEQSDEDRALLNDMWGPGLTRSPEQQRVIAALAPDEHDTVLVKWRYSAFHRSPLEEMLKESGRDQLIITGVYAHIGCMTTATDAFMRDIKPFFVADALADFSREEHLMSLKYVAGRCGRVVMTEELLSLPASKTALRALVLPLLDESDEPMDDENLIDYGLDSVRMMALAARWRKVHGDIDFVMLAKNPTIDAWWALLSREVK

SEQ ID NO: 92818 - protein, 145 aa, Raoultella planticola
  misc_feature (1)..(145): tr|A0A485AFB1|A0A485AFB1_RAOPL Isochorismatase OS=Raoul tella planticola OX=575 GN=dhbB PE=4 SV=1
MISGAPSQDSLLPDNRHAADYQQLRERLIQELNLTPQQLHEESNLIQAGLDSIRLMRWLHWFRKNGYRLTLRELYAAPTLAAWNQLMLSRSPENAEEETPPDESSWPNMTESTPLPIDASTARLPDGPHAGADAWRRGLPPVSGV

SEQ ID NO: 92819 - protein, 283 aa, Raoultella sp.
  misc_feature (1)..(283): tr|A0A509CMN4|A0A509CMN4_9ENTR Isochorismatase OS=Raoul tella sp. NCTC 9189 OX=2583577 GN=entB PE=4 SV=1
MAIPQLQAYALPEASDIPANKVSWAFEPSRAALLIHDMQEYFLNFWGEDSAMMAKVVANIAALRDFCKQHDIPVFYTAQPKEQSDEDRALLNDMWGPGLTRSPEQQQVIAALAPDENDTVLVKWRYSAFHRSPLEEMLKEAGRDQLIVTGVYAHIGCMTTATDAFMRDIKPFFVADALADFSREEHLMALKYVAGRCGRVVMTEELLPLPASKAALRALVLPLLDESDEPMDDENLIDYGLDSVRMMALAARWRKVHGDIDFVMLAKNPSIDAWWALLSREVK

SEQ ID NO: 92820 - protein, 246 aa, Raoultella terrigena
  misc_feature (1)..(246): tr|A0A3P8J427|A0A3P8J427_RAOTE Isochorismatase OS=Raoul tella terrigena OX=577 GN=entB PE=4 SV=1
MQEYFLNFWGEDSAMMAKVVANVAALRDFCKQHDIPVFYTAQPKEQSDEDRALLNDMWGPGLTRSPEQQRVIAALAPDENDTVLVKWRYSAFHRSPLEEMLKEAGRDQLIVTGVYAHIGCMTTATDAFMRDIKPFFVADALADFSREEHLMALKYVAGRCGRVVMTEELLPLPASKAALRALVLPLLDESDEPMDDENLIDYGLDSVRMMALAARWRKVHGDIDFVMLAKNPSIDAWWALLSREVK

SEQ ID NO: 92821 - protein, 230 aa, Reinekea forsetii
  misc_feature (1)..(230): tr|A0A2K8KRD7|A0A2K8KRD7_9GAMM Isochorismatase family p rotein OS=Reinekea forsetii OX=1336806 GN=entB PE=4 SV= 1
MNKPLDGEFVAAKPYPYPLSINKPCLIIIDMQKDFLEPGGFGESLGNDVSLLRSVIDPLKALLKHCRSLGVPVVHTREGHKSDMSDCPPAKLNRGNTNLKIGTTGPMGRILINDSAGNQIIDELRPIEGELELLKPGKGAFYNTQLASHLKTLGCTHLLVAGVTTEVCVQTTMREANDRGFECLLLEDCTESYFPEFKRSTIEMITAQGGIVGWSTDSVTLREALERCYG

SEQ ID NO: 92822 - protein, 181 aa, Rheinheimera sp.
  misc_feature (1)..(181): tr|A0A486XYN1|A0A486XYN1_9GAMM Isochorismatase OS=Rhein heimera sp. BAL341 OX=1708203 GN=BAL341_3767 PE=4 SV=1
MLLQASQSMVLLIDMQQKLAPAIFECKEVEQAAAWVLQVALQLDVPVWATEQYPQGIGATLPALAELIPETQVLQKMHFSALKEPHIASSLACTERKQIVVLGTEAHVCVLQSVMDLLELGYQVFVVVEAVGSRTEQNKQLALSRMQQAGAQVISKEMLAFEWLECCGTDTFRQISKGWIR

SEQ ID NO: 92823 - protein, 188 aa, Rhizobium etli
  misc_feature (1)..(188): tr|Q2JYY4|Q2JYY4_RHIEC Probable isochorismatase protein OS=Rhizobium etli (strain CFN 42 / ATCC 51251) OX=3478 34 GN=RHE_PF00312 PE=4 SV=1
MSGHETILLVIDAQESFRQRDHWDESLASAYIDRQQALIDGAAASGIPVVQIFHVDGSGPFSESSGFVRTLAPLRIAPDVTFKKSRHSALVGSGLDVWLTENGVRRIIVSGIRTEQCCETTTRHASDLGYQVDYVGEATLTFPMTDAAGRTWSAGEIRGRTELVLSGRFARISTVEQALAGRAEQLAA

SEQ ID NO: 92824 - protein, 223 aa, Rhizobium favelukesii
  misc_feature (1)..(223): tr|W6RM31|W6RM31_9RHIZ Isochorismatase hydrolase OS=Rhi zobium favelukesii OX=348824 GN=LPU83_pLPU83c_0723 PE=4 SV=1
MMFEIKAQPFAFPTRRDQLALIVIDMQRDFAEPGGFGASLGNDVSRVAKIVPDVKRLLQGFRDAGLPVIHTMECHKPDLSDLPSAKRDRGKPSLRIGDDGPMGRILIAGEAGTAILPELAPIDGEIVIEKPGKGAFYATELGDVLKAKGISQLVFAGVTTEVCVQTTIREANDRGYECLLAEEATESYFPEFKEAAIAMIRAQGAIVGWTAHVDDILEVIGHA

SEQ ID NO: 92825 - protein, 192 aa, Rhizobium fredii
  misc_feature (1)..(192): tr|G9A9L7|G9A9L7_RHIFH Isochorismatase, hydrolase OS=Rh izobium fredii (strain HH103) OX=1117943 GN=SFHH103_024 43 PE=4 SV=1
MNPEKWIHLCIDMQRMFAEGTPWQVAWMPKVFDQVAEVAARFPDRTIFTRFVPPASPEELPGMWRAYYEKWPMMTTAELDRDLVDLVPDLKKLVPPAHILDKTTYSPWTGGRLHGALTRQDIGTLVVTGGETDVCVLAATLGAIDLGYKVLLLKDAVCSTTDQTHDASLELLGNRFSVQVEVISTERWLSSH

SEQ ID NO: 92826 - protein, 233 aa, Rhizobium mesoamericanum
  misc_feature (1)..(233): tr|K0Q2G0|K0Q2G0_9RHIZ Putative isochorismatase family protein OS=Rhizobium mesoamericanum STM3625 OX=1211777 GN=BN77_p11049 PE=4 SV=1
MDAMAETKGHYIDADPYAWPYNGALRPDNTALIIIDMQTDFCGKGGYVDHMGYDLSLVQAPIEPIKRVLAAMRAKGYHIIHTREGHRPDLADLPANKRWRSRRINAGIGDPGPCGRILVRGEPGWEIIPELRPADGETVIDKPGKGSFCATDLELILNQKRIENIILTGITTDVCVSTTMREANDRGFECLLLEDCCGATDYGNHLAAIKMVKMQGGVFGSVSNAETLVSQLP

SEQ ID NO: 92827 - protein, 208 aa, Rhizobium radiobacter
  misc_feature (1)..(208): tr|A0A083ZMR8|A0A083ZMR8_RHIRD Putative isochorismatase OS=Rhizobium radiobacter OX=358 GN=SY94_5273 PE=4 SV=1
MIEFSAEGDWRHLCVDMQRVFAEDTPWHVEWMDRISEEVEVVVASDPARCIFTCFVPPRSVGEARGAWRAYYEKWPMMTQQALAPELIEVIPSLSRYIPPARIFRKSVYSPWQHGGLGEILRQEQVSTLVITGGETDVCVLATVLGAIDQGFYVILVEDALCSGRDATHDAAMKLLSGRFSTQLQVCDTATLLQALPPKKGARLPEIS

SEQ ID NO: 92828 - protein, 229 aa, Rhizobium sp.
  misc_feature (1)..(229): tr|U4Q4E4|U4Q4E4_9RHIZ Putative Isochorismatase family protein OS=Rhizobium sp. IRBG74 OX=424182 GN=BN877_II11 07 PE=4 SV=1
MSKLEVLTPANSQIIFIDQQPQMAFGVQSIDRQTLKNNVVGLAKAAKIFNIPTTITTVETESFSGNTFPELLAVFPENDILERTSMNSWDDQNVRDALAKNAANGRKKIVVSGLWTEVCNTTFALSALHDVADYEIYMVADASGGTSVDAHKYAMDRMVQAGVIPVTWQQVLLEWQRDWARKETYDAVTSLVKEHSGAYGMGIDYAVTHVHGGAERVKHGKRIGPNPAK

SEQ ID NO: 92829 - protein, 181 aa, Rhodobacter capsulatus
  misc_feature (1)..(181): tr|D5AR52|D5AR52_RHOCB Isochorismatase OS=Rhodobacter c apsulatus (strain ATCC BAA-309 / NBRC 16581 / SB1003) O X=272942 GN=entB PE=4 SV=1
MGKTALLIIDMQSEMQARLDAGRAAVNREAGAAIAALAGACRAKGVAVVHVRHHDAGPASPLHPDAPGAQPMPCDAALPGEAVFLKSTSSAFASTDLAAHLRGQGIDRLIITGAVLGFCVTSTVRAAADLGFAVILPRDACLGFDLPGMGLSAEEIARVSFGLLGADFATLTTTPEVIASL

SEQ ID NO: 92830 - protein, 219 aa, Rhodobacteraceae bacterium
  misc_feature (1)..(219): tr|A0A418SFN8|A0A418SFN8_9RHOB Isochorismatase OS=Rhodo bacteraceae bacterium Lw-13e OX=1537215 GN=dhbB PE=4 SV =1
MALPTIPDYALPERLPTPRAPFALDRNRAALLVHDMQRYFCAPYGADAATRNNGPLRRATANIARLLDAARRVGVPVFYTAQKGDQFRPDRGLQADLWGPGMSATPEHEDILPELAPSEGDITLHKHRYSAFQRSNLDQLLRARGRDQLMITGIYAHIGCLCTATEAFQRDIEPFFVADALADFGPDQHAMALNWVAATCGVPIDTDDTLATLTAGEPA

SEQ ID NO: 92831 - protein, 213 aa, Rhodococcus coprophilus
  misc_feature (1)..(213): tr|A0A2X4TZ46|A0A2X4TZ46_9NOCA Isochorismatase OS=Rhodo coccus coprophilus OX=38310 GN=dhbB PE=4 SV=1
MALPKSVSYSLPDEQPANVVSWSVDPDRAVLLVHDMQEYFVRSFDRTADPLATVVPHIDQLRNAAHEVGVPVVYTAQPGDQDPSDRALLSDFWGPGLSEDPNETSIIAELAPHAGDTLLTKWRYSAFIRTDLLERMRAWGRDQLIVTGVYAHIGCLTTALDGFMNDIQVFFVSDGTADFSQREHIDALNYVASRCAVVLPTDDVVGALSSVRA

SEQ ID NO: 92832 - protein, 215 aa, Rhodococcus erythropolis
  misc_feature (1)..(215): tr|C0ZYH2|C0ZYH2_RHOE4 Isochorismatase OS=Rhodococcus e rythropolis (strain PR4 / NBRC 100887) OX=234621 GN=RER _26990 PE=4 SV=1
MALPTAVRYEMPTEFPQNRVDWTLDPSRAVLLLHDMQEYFVNAYDRSVDPLQTVVPNIDRLRSSARAAGIPIVYTAQPGDQDPEERALLSDFWGPGLKADPAHTDVIAELAPHPDDVMLTKWRYSAFIKTDLRERLRESGRDQLIITGIYAHIGCLTTALDGFMQDVQIFFVGDAVADFSLGEHVGALEYAAGRCASVTRTDDLVKAMSAETVSA

SEQ ID NO: 92833 - protein, 208 aa, Rhodococcus fascians
  misc_feature (1)..(208): tr|A0A161GGF8|A0A161GGF8_RHOFA Putative isochorismatase OS=Rhodococcus fascians D188 OX=1051973 GN=phzD PE=4 S V=1
MATFSVEVEKYAVETLRDCVGGPEWELRPERAALLVHDMQPYYLNVLHSSVRARVAAEASAVLACARSAGVPILASGPRAAEAIEQRGLLGPMWGLGPSADDVAVTESDFVPIAKRSYSAFYASDLEVELRRRGRDQLVIVGVFASAGILATTFDAFARDIQCFVGIESVADHTAHQHRTALNLITSLTGVVTSSANLLHDLRCGPLD

SEQ ID NO: 92834 - protein, 228 aa, Rhodococcus gordoniae
  misc_feature (1)..(228): tr|A0A379M417|A0A379M417_9NOCA Isochorismatase OS=Rhodo coccus gordoniae OX=223392 GN=dhbB PE=4 SV=1
MAIPSIDPYELPTGDEIPAARVDWTLDASRCALLVHDMQKYFIDAYRCDAEPLATVVPNIVRLREACLAAGIPVVYTMQPGDQHPSRRGILADFWGVGLSTGRDTEVIDELTPGPDDIQVTKWRYSAFQRTDFRQLLAHNGRDQLIVTGVYAHMGCMLSAADAFMSDVAPFMALDATADFSRDEHLTALQYVAKRVGRVETTNALIESIVASARCRDREAEELTASLR

SEQ ID NO: 92835 - protein, 215 aa, Rhodococcus jostii
  misc_feature (1)..(215): tr|Q0SEB2|Q0SEB2_RHOJR Isochorismatase OS=Rhodococcus j ostii (strain RHA1) OX=101510 GN=RHA1_ro02318 PE=4 SV=1
MAIPPISTYTIPEIHEVPESKVSWRLDPRRSALLVHDMQNYFIDAYDVRAEPMSTAMANMVRIRELCSEAGIPVIYTMQPGDQHPSRRGILADFWGPGLTSGRDTEVVEPLAPREGDIQVTKWRYSAFQRTDLRQLLGHHGRDQLIVTGVYAHMGCMLSAAEAFMSDVQPFLVSDATADFSRDEHLMALTYAAKRCGSVTTTDALVSALSPLEVG

SEQ ID NO: 92836 - protein, 215 aa, Rhodococcus opacus
  misc_feature (1)..(215): tr|C1B0T3|C1B0T3_RHOOB Isochorismatase OS=Rhodococcus o pacus (strain B4) OX=632772 GN=ROP_20360 PE=4 SV=1
MAIPPISTYTIPEIHEVPESKVSWRLDPRRSALLVHDMQNYFIDAYDVRAEPMSTAMANMVRIRELCSEAGIPVIYTMQPGDQHPSRRGILADFWGPGLTSGRDTEVVEPLAPREGDIQVTKWRYSAFQRTDLRQLLGHHGRDQLIVTGVYTHMGCMLSAAEAFMSDVQPFLVSDATADFSRDEHLMALTYAAKRCGSVTTTDALVSALSPLEVG

SEQ ID NO: 92837 - protein, 217 aa, Rhodococcus rhodochrous
  misc_feature (1)..(217): tr|W4A0M0|W4A0M0_RHORH Isochorismatase OS=Rhodococcus r hodochrous ATCC 21198 OX=1429046 GN=RR21198_4490 PE=4 S V=1
MALPKSVSYPLPTDLPANTVDWTIDPGRAVLLVHDMQEYFVRAFDRAADPLATVVPNIDAIRRSAYEAGIPVVYTAQPGDQDPAERALLTDFWGPGLADDPALTSVVADLAPREDDVQLTKWRYSAFIRTDLRERMRAWGRDQLVVTGVYAHIGCLSTALDGFMQDVQVFVVADGVADFSRREHTEALHYLAARCAAVVPAADAVRRLRTRVLSVSG

SEQ ID NO: 92838 - protein, 217 aa, Rhodococcus ruber
  misc_feature (1)..(217): tr|A0A098BQ21|A0A098BQ21_9NOCA 2,3-dihydro-2,3-dihydrox ybenzoate synthetase, isochorismatase OS=Rhodococcus ru ber OX=1830 GN=dhbB PE=4 SV=1
MALPKSVSYPMPTDLPENTVDWTIDPRRAVLLVHDMQEYFVRAFDRTADPLATVVPNIDTIRQSAYEAGIPVVYTAQPGDQDPAERALLTDFWGPGLADDPALTSVVAELAPREDDVQLTKWRYSAFIRTDLRERMHAWGRDQLVVTGVYAHIGCLSTALDGFMRDVQVFVVADGVADFSRREHTEALQYLAARCAAVVPAADAVRRLRTGALSVSG

SEQ ID NO: 92839 - protein, 76 aa, Rhodococcus sp.
  misc_feature (1)..(76): tr|A0A0D8I0G3|A0A0D8I0G3_9NOCA Isochorismatase OS=Rhodo coccus sp. AD45 OX=103808 GN=dhbB_1 PE=4 SV=1
MTTAFTRERIISDLAEVLDLPVDELTEDVSLIDLGLDSVRLMSLVERWRFEGAAIDFVDLASDPQVGAWLEVMGAE

SEQ ID NO: 92840 - protein, 200 aa, Rhodoferax antarcticus
  misc_feature (1)..(200): tr|A0A1Q8YB68|A0A1Q8YB68_9BURK Isochorismatase OS=Rhodo ferax antarcticus ANT.BR OX=1111071 GN=BLL52_3390 PE=4 SV=1
MLLEADTSQLVLVDYQARLMPAIFEAPLVLANAVRLAKMARLLNVPVIGTEQNPSKLGENAPEVRALCQRTLAKMHFGGVEEGLGEWLRPPVKPPAGNARSLPKHLQKPSNTPSERNTIVIAGCEAHVCLLQTALQLLEDEFDVWVVTDACSSRTERNRDAAFDRLAGAGAELVTTEMVAFEWLRSAEHPQFKAVLPLIK

SEQ ID NO: 92841 - protein, 210 aa, Rhodomicrobium vannielii
  misc_feature (1)..(210): tr|E3I7N3|E3I7N3_RHOVT Isochorismatase OS=Rhodomicrobiu m vannielii (strain ATCC 17100 / ATH 3.1.1 / DSM 162 / LMG 4299) OX=648757 GN=Rvan_0363 PE=4 SV=1
MILENKAGWVLEPGRCALLIHDMQRHYLDALPDAATRADLVGKVAGLRALCAEWGVPVFASMVPEAHGLQERGLMSELWGRGPRGDGAMLDQALLGNDSRIRLITKRSYSAFYGTDLEVMLRRLGRDSLVITGLYTSIGCFSTALEAFARDIRAFVVADATADMSAADHAAGLRNAARLCARVVDSGDVRAALAPHSLRPVDRRAAIDVC

SEQ ID NO: 92842 - protein, 189 aa, Rhodospirillum rubrum
  misc_feature (1)..(189): tr|Q2RQT1|Q2RQT1_RHORT Isochorismatase hydrolase OS=Rho dospirillum rubrum (strain ATCC 11170 / ATH 1.1.1 / DSM 467 / LMG 4362 / NCIB 8255 / S1) OX=269796 GN=Rru_A271 7 PE=4 SV=1
MSFATPSLIDAARSVLIVVDIQERLCPVMTDPRGVLFNGARLVRGARRLGVPVVVTEQYPKGLGPTMHDILSELGDGASSAVIEKTHFSAAAEPLVRQHLESLGRRQAVICGIEAHVCVTQTAIDLRAAGWEVFVVSDACSSRRPESLTAALTRFPAAGVVPVITEMVLFEWLADKNNDGFKDIMSLVR

SEQ ID NO: 92843 - protein, 83 aa, Rhodovulum sulfidophilum
  misc_feature (1)..(83): tr|A0A0D6B996|A0A0D6B996_RHOSU 2,3-dihydro-2,3-dihydrox ybenzoate synthetase OS=Rhodovulum sulfidophilum OX=358 06 GN=NHU_04518 PE=4 SV=1
MTLTTTSTAPDRDWLSARLNSLLEDEGPIDPTESLIYYGLDSLRVMKLAAELNAHGIHVGFEDLAREPTLDAWTALIDARRDG

SEQ ID NO: 92844 - protein, 202 aa, Ricinus communis
  misc_feature (1)..(202): tr|B9SY42|B9SY42_RICCO Isochorismatase, putative OS=Ric inus communis OX=3988 GN=RCOM_0986590 PE=4 SV=1
MATRCPSSYKKYEIRRRDPDPKFSVLLVVDAQNYFSSMVKPILPNLLQTIDLCRRASIPVFFTRHRHKSPADYGMLGEWWNNDLIIDGTVESQLVPEIKRLVLGKDHEVVEKNTYSAFTNTRLHERLLEMGVEEVIVTGVMTNLCCETTARDAFVRGFRVFFSTDATATSDLELHEATLKNLAYGFAYMVDCQRLENGLFRN

SEQ ID NO: 92845 - protein, 200 aa, Roseimaritima ulvae
  misc_feature (1)..(200): tr|A0A5B9QWY0|A0A5B9QWY0_9PLAN Isochorismatase OS=Rosei maritima ulvae OX=980254 GN=entB PE=4 SV=1
MAKPKSATGSLHGSAPDVGDVALLLIDVINDLEFEGGDKLLQLAKPMAERLAALRDQFRNAELPIIYANDNFGRWKSDFRVQVDHCLHGGVRGKPIVEMLQPLDEDYFVLKPKHSAFYATTLDVLLKHLEVKRLVITGMATDICVLFTANDAYMRDFQVTIPADCVAANSQPQSDAALRLMQRVLKADIRESTALLNKIG

SEQ ID NO: 92846 - protein, 177 aa, Roseobacter sp.
  misc_feature (1)..(177): tr|B7RSD4|B7RSD4_9RHOB Isochorismatase OS=Roseobacter s p. GAI101 OX=391589 GN=entB PE=4 SV=1
MQTWYVDRYEEPNGLLTNIEAIREVAERAGMPVIFAAADPVQHVAERGIAADLWGPGIGVVTDARCEDDEMHPRLTPKPEDFIIRKRKYSAFFQTDLEALLRRLNRSQIVLTGNYANHGCTVTAIDAYMRNFKVFFVADALGAFDAASHEHALRTVTDICGYVTLTDRVVPQIISTK

SEQ ID NO: 92847 - protein, 87 aa, Roseomonas cervicalis
  misc_feature (1)..(87): tr|D5RMA8|D5RMA8_9PROT Phosphopantetheine attachment do main protein OS=Roseomonas cervicalis ATCC 49957 OX=525 371 GN=entB2 PE=4 SV=1
MADAAPPPLTRARMRADIAQALRLAPGEFTDDEDLADLGLDSLRAIDLVTRWAEAGLPLEFSELSERLSVDAWWAVAERALARRAHG

SEQ ID NO: 92848 - protein, 214 aa, Roseomonas gilardii
  misc_feature (1)..(214): tr|A0A379N5A9|A0A379N5A9_9PROT Isochorismatase OS=Roseo monas gilardii subsp. rosea OX=243956 GN=dhbB_1 PE=4 SV =1
MSSTKGLPRIPAYPLPRAEELPAARAPWRLERDRAALLVHDMQRYFVGAFTPDEPPIEPVLANIHALAAKARLAGIPVFYTAQEGDQDRRDRGLQADLWGKGMSWSQDHQPILDDLAPQPHDFVLVKHRYSAFQRSNLETLMRARGRDQIIVCGIYAHIGCLLTAAEAFMRDIEPFYAADAVADFSREKHDMALRYVADVCGVPMTTKQILEVL

SEQ ID NO: 92849 - protein, 84 aa, Roseomonas mucosa
  misc_feature (1)..(84): tr|A0A1S8D616|A0A1S8D616_9PROT Isochorismatase OS=Roseo monas mucosa OX=207340 GN=dhbB_2 PE=4 SV=1
MSHAPLTREGMRADIARLLHEDPSEIGDDDSLIDLGLDSMRAMNLLLLWSERGLSLDFGEFAEELTLNTWWAIVERRQKAQAGG

SEQ ID NO: 92850 - protein, 214 aa, Roseomonas sp.
  misc_feature (1)..(214): tr|A0A1Q2YZ09|A0A1Q2YZ09_9PROT Isochorismatase OS=Roseo monas sp. TAS13 OX=1926319 GN=dhbB_1 PE=4 SV=1
MSSTKGLPRIPAYPLPRAEELPAPRAPWRLERDRAALLVHDMQRYFVGAFTPDEPPIELVLANIHALAAKARRAGIPVFYTAQEGDQDRRDRGLQADLWGRGMSWSQDHQPILDELAPQPDDFVLVKHRYSAFQRSNLETLMRARGRDQIIVCGIYAHIGCLLTAAEAFMRDIEPFYAADAVADFSREKHDMALRYVADVCGVPMTTTQILEVL

SEQ ID NO: 92851 - protein, 178 aa, Roseovarius gaetbuli
  misc_feature (1)..(178): tr|A0A1X6Y3N0|A0A1X6Y3N0_9RHOB Putative isochorismatase OS=Roseovarius gaetbuli OX=1356575 GN=phzD PE=4 SV=1
MLTIDARTSHLLVIDFQARLMPAIHDSAPVVQNAGRLLSAARRLELPISYTEQNPKGLGTTLPELAPEPGEEVLHKMTFDACRTPEVTAHLADNTALVVMGCEAHVCVLQTVLGLLSDGRRVYVVADAIGSRMEENRRAALGRMAHHGAEIVTTEMVIFEWMTTAEHPEFRDIVKLVK

SEQ ID NO: 92852 - protein, 192 aa, Roseovarius mucosus
  misc_feature (1)..(192): tr|A0A1V0RL96|A0A1V0RL96_9RHOB Vibriobactin-specific is ochorismatase OS=Roseovarius mucosus OX=215743 GN=vibB PE=4 SV=1
MNTTFVDDIRGTIMLIRAADSALVIIDMQERLVPAMQAPARTIRNARTLMACAQEMAVPVVMTEQYPSGLGRTVPDLKPGPDAVVLSKMHFSCMEDTHFAAHFRALGRKQAVLAGMEAHVCVLQTAASLIEEGFEVFVVSDATASRTLESEHACIARLSAAGAGIATTEMVVFEWLGQAGTPAFKKLLPLIK

SEQ ID NO: 92853 - protein, 192 aa, Roseovarius sp.; identical to SEQ ID NO: 92852
  misc_feature (1)..(192): tr|A0A5E8AV33|A0A5E8AV33_9RHOB Vibriobactin-specific is ochorismatase OS=Roseovarius sp. EC-HK134 OX=2038394 GN =vibB PE=4 SV=1

SEQ ID NO: 92854 - protein, 238 aa, Rothia dentocariosa
  misc_feature (1)..(238): tr|E3H114|E3H114_ROTDC Isochorismatase OS=Rothia dentoc ariosa (strain ATCC 17931 / CDC X599 / XDIA) OX=762948 GN=entB PE=4 SV=1
MAGGDHMALPKIAPYSYREQEHQNRVNWRVDPARSALLVHDMQRYFVRAFELERDGQPLPDAQINIAIANIRRLLDAAHAANIPVYYTAQPPRQNPADRRLLTDFWGDGLQDDENARILDELAPTEADTVLTKWRYSAFARSPLEEQLKDLGRDQLIIGGIYAHIGCLTTALEAFMRDIQPFMVADALADFTEKEHRMACEYASGRCSRVLNTAEVLEHINASDLVTADEPELRKVCV

SEQ ID NO: 92855 - protein, 241 aa, Rothia kristinae
  misc_feature (1)..(241): tr|A0A147E8I8|A0A147E8I8_9MICC Isochorismatase OS=Rothi a kristinae OX=37923 GN=dhbB PE=4 SV=1
MPLPTIPAYTLPQDRPAAAVDWTADPTRSALLVHDMQSYFIDAFQSGEDGAEGEAGEGSAQGEAAPVGAAQIDVAVGRIAALLETARKAGIPIVYTAQPPRQDLADRALLTDFWGTGLSTDAQARIIDELAPAEGDIVLPKWRYSAFMRSTLREQLLARGRDQLAITGVYAHIGCLATALDAFMLDVQAFLVADALADFTREDHVRALDYAAGRCARVQDTAEILASWQDAQDEQGQGVSR

SEQ ID NO: 92856 - protein, 192 aa, Rubripirellula obstinata
  misc_feature (1)..(192): tr|A0A5B1CSV2|A0A5B1CSV2_9PLAN Vibriobactin-specific is ochorismatase OS=Rubripirellula obstinata OX=406547 GN= vibB PE=4 SV=1
MPHVASVHRLDSNRSGLLVVDLQERLVPVIPSGDQVVRQTQRLLKAADMLQVPSAATVQYPKGLGNLVAPLDQWFSHDKNSPEEKLEFSSAVCRQSLDAWTQAGRDQIVVTGIETHVCILQTVLDLMAEGCFAYVVAEAVAARHGRDHETAMDRMRDAGATIITAESVMFEWLGTADHPQFKEISKLVKAGV

SEQ ID NO: 92857 - protein, 185 aa, Rubrivivax gelatinosus
  misc_feature (1)..(185): tr|I0HME8|I0HME8_RUBGI Putative isochorismatase hydrola se family protein OS=Rubrivivax gelatinosus (strain NBR C 100245 / IL144) OX=983917 GN=RGE_08440 PE=4 SV=1
MSTAVLLIDVQQSFTARPYWDPAAAPGFLARVNALVAGATERGLPVVRILHTDGPKTADNPFALESGLVRPLDGLAPYDAAASFLKERHSALVGTGLTVWLHQQGIRRLIVAGIRTEQCCETTTRHASDEGWEVDYVTEATLTFAMTTPAGRTLSPAELYERTETVLAGRFATICSVEQALQRAA

SEQ ID NO: 92858 - protein, 178 aa, Ruminiclostridium cellobioparum
  misc_feature (1)..(178): tr|S0FHN2|S0FHN2_RUMCE Isochorismatase hydrolase OS=Rum iniclostridium cellobioparum subsp. termitidis CT1112 O X=1195236 GN=CTER_3244 PE=4 SV=1
MKETALLIIDVQVAMFSYENEYPYNGDAVLNNIREMLFKARENNIPVIFVQHTAADEYQKDTATWQICPEIAPLEQEYVVQKTQRDSFYNTNLKEILDGLGIKKLIVAGMQTEFCVDTTCRIAYSAGYELTLVKDAHTTFDSPVLPAEQIISHHNGVLKGIAGLKTTKEILEQIARID

SEQ ID NO: 92859 - protein, 221 aa, Saccharomonospora viridis
  misc_feature (1)..(221): tr|C7MVZ8|C7MVZ8_SACVD Isochorismate hydrolase OS=Sacch aromonospora viridis (strain ATCC 15386 / DSM 43017 / J CM 3036 / NBRC 12207 / P101) OX=471857 GN=Svir_20850 PE =4 SV=1
MSLPRIQPYPLPTAAERPAGRVAWRLDPNRAALLVHDMQRYFLAPYAGEPIPEVVDNIATLATAFRDHGAPVFYTAQPGHQPPAERGLLTEFWGDGIGAVIDTDPQAADIIPELAPEPADTVLVKWRYSAFQRSAFAEQLAELGRDQLVITGVYAHIGCQTTAVEAFMRDIRPFLVSDAVADFSREHHDQACAYVAQRCGVVTTTADAVSTLSAPIHTGVM

SEQ ID NO: 92860 - protein, 319 aa, Saccharophagus degradans
  misc_feature (1)..(319): tr|Q21F76|Q21F76_SACD2 Isochorismatase OS=Saccharophagu s degradans (strain 2-40 / ATCC 43961 / DSM 17024) OX=2 03122 GN=Sde_3398 PE=4 SV=1
MAIPKINNYSLTGQVKATNEEYGNRVSWPLDANKAVLLVHDMQKYFVEFYDQQGEPMRSLVQNIQTIVAQCKAAGIPIVYTAQPPHQAPEERALLTDFWGAGLTSENNQHAIVESLKPAADDLVFTKWRYSAFQRTPLHEYMAENNKDQLWIVGVYAHIGILSTALEAFMTDIKAFVVADAVADFSSTEHSMALHYISRRCGRVVALQDIHVATEENKAALASKGANTPQTGSEILNNIAVSVSTALGMAVEELDQDENLFEMGLDSIRLMAIVDVLRENNIEIGFAELAEQPTLKAWAAMLGALPVISAQENRLVTNE

SEQ ID NO: 92861 - protein, 132 aa, Saccharopolyspora erythraea
  misc_feature (1)..(132): tr|A4FGE8|A4FGE8_SACEN Isochorismatase (2,3 dihydro-2,3 dihydroxybenzoate synthase) OS=Saccharopolyspora eryth raea (strain ATCC 11635 / DSM 40517 / JCM 4748 / NBRC 1 3426 / NCIMB 8594 / NRRL 2338) OX=405948 GN=dhbB
MALPAIAPYSVPRQEELPANRVDWRPAADRAVLLVHDMERHFVNAFTPGREPLTEVVANIRTLRASAHAAGVPVVYCAQPSGRPGATPVRCAELAPDRSRRRQVTSTKAPAETGRSRSRARSAGAPARPAAS

SEQ ID NO: 92862 - protein, 214 aa, Saccharothrix espanaensis
  misc_feature (1)..(214): tr|K0JZB6|K0JZB6_SACES Isochorismatase OS=Saccharothrix espanaensis (strain ATCC 51144 / DSM 44229 / JCM 9112 / NBRC 15066 / NRRL 15764) OX=1179773 GN=BN6_27020 PE=4 SV=1
MGLPTIEPYPMPTEADLPVNRVKWTCEPSRAVLLVHDMQNYFLRAFSPDASPVVELVRNIRALRDTCHALGVPVVYSAQPGGQSTEQRGLQLDMWGTGIGPDPVDAEIHAALEPGESDVRLTKWRYNAFHRTDLRSLLDTTGRDQLVVTGIYAHIGCLMTAADAFMQDIQAFFVADAVADFTPDDHHMAVRYAAGRCAVTTTTTRLITELNGAS

SEQ ID NO: 92863 - protein, 230 aa, Salinisphaera shabanensis
  misc_feature (1)..(230): tr|U2G3P1|U2G3P1_9GAMM Isochorismatase protein OS=Salin isphaera shabanensis E1L3A OX=1033802 GN=SSPSH_000080 P E=4 SV=1
MNPAFQSLASACPYAWPVTGDWRVADTALLVIDMQRDFLDPDGYFAALGENASELREAVGPAAKVLALARRLGMRVIHTREGHRPDLADLNDTKRARALAMGAPIGGPGPLGRLLVRGEPGWDSIAEMAPVDDEIVIDKCGNGAFHATDLDQVLRANGIRNLWLVGVTTDVCVSSTMREANDRGYDVLLISDACCAATSALHAATLAGIEREGGVFGAHISSSALLEAVR

SEQ ID NO: 92864 - protein, 224 aa, Salinisphaera sp.
  misc_feature (1)..(224): tr|A0A2Z3J2M9|A0A2Z3J2M9_9GAMM Isochorismatase OS=Salin isphaera sp. LB1 OX=2183911 GN=SALB1_0448 PE=4 SV=1
MSQALLVIDMQRDFCEAGGYAAACGLDIALLRQPIEPTGRLIAAARQNGIAVIYTREGHRPDLADCHPAKLARSAACGASIGAHASLGRHLVRGEPGHDVVPELAPAAGDPIVDKPGYGAFYQTDLELLLQARGTTHLYVTGVTTDICVHSTLREAIDRGYECVTVADACAAADVGIHSAALGLIEGPEGPILGRVRDTATVLADWGRGQPAAASNNANQGALT

SEQ ID NO: 92865 - protein, 285 aa, Salmonella agona
  misc_feature (1)..(285): tr|B5EYI8|B5EYI8_SALA4 Isochorismatase OS=Salmonella ag ona (strain SL483) OX=454166 GN=entB PE=4 SV=1
MAIPKLQSYALPTALDIPTNKVNWAFEPERAALLIHDMQDYFVSFWGRNCPMMDQVIANIAALRQYCKEHHIPVYYTAQPKEQSDEDRALLNDMWGPGLTRSPEQQKVVEALTPDEADTVLVKWRYSAFHRSPLEQMLKDTGRNQLIITGVYAHIGCMTTATDAFMRDIKPFMVADALADFSREEHLMALNYVAGRSGRVVMTESLLPTPVPASKAALRALILPLLDETDEPLDDENLIDYGLDSVLMMGLAARWRKVHGDIDFVMLAKNPTIDAWWALLSRGVE

SEQ ID NO: 92866 - protein, 285 aa, Salmonella bongori
  misc_feature (1)..(285): tr|A0A3S4E7H0|A0A3S4E7H0_SALBN Isochorismatase OS=Salmo nella bongori OX=54736 GN=entB PE=4 SV=1
MAIPKLQSYALPTAQDIPTNKVNWAFEPERAALLIHDMQDYFVSFWGRDCPMMDQVIANIAALRQYCKEHHIPVYYTAQPKEQSDEDRALLNDMWGPGLTRSPEQQKVVEALTPDEADTVLVKWRYSAFHRSPLEQMLKDTGRNQLIITGVYAHIGCMTTATDAFMRDIKPFMVADALADFSREEHLMALKYVAGRSGRVVMTESLLPTPVPASKAALRAMILPLLDESDEPVDDENLIDYGLDSVRMMGLAARWRKVHGDIDFVMLAKNPTIDAWWALLSREVE

SEQ ID NO: 92867 - protein, 285 aa, Salmonella diarizonae
  misc_feature (1)..(285): tr|A0A379U227|A0A379U227_SALDZ Isochorismatase OS=Salmo nella diarizonae OX=59204 GN=entB PE=4 SV=1
MAIPKLQSYALPTALDIPTNKVSWTFEPERAALLIHDMQEYFVSFWGRNCPMMDLVIANIAALRQYCKEHHIPVYYTAQPKEQSDEDRALLNDMWGPGLTRSPDQQKVVEALTPDEADTVLVKWRYSAFHRSPLEQMLKDTGRNQLIITGVYAHIGCMTTATDAFMRDIKPFMVADALADFSREEHLMALNYVAGRSGRVVMTESLLPAPVPASKTALRALILPLLDETDEPLDDENLIDYGLDSVRMMGLAARWRKVHGDIDFVMLAKNPTIDAWWALLSREVQ

SEQ ID NO: 92868 - protein, 191 aa, Salmonella enterica
  misc_feature (1)..(191): tr|A0A379UM85|A0A379UM85_SALET Isochorismatase OS=Salmo nella enterica I OX=59201 GN=entB_2 PE=4 SV=1
MGPGLTRSPEQQKVVEALTPDEADTVLVKWRYSAFHRSPLEQMLKDTGRNQLIITGVYAHIGCMTTATDAFMRDIKPFMVADALADFSREEHLMALNYVAGRSGRVVMTESLLPTPVPASKAALRALILPLLDETDEPLDDENLIDYGLDSVRMMGLAARWRKVHGDIDFVMLAKNPTIDAWWALLSRGVE

SEQ ID NO: 92869 - protein, 285 aa, Salmonella houtenae
  misc_feature (1)..(285): tr|A0A3Y1WYD4|A0A3Y1WYD4_SALHO Isochorismatase OS=Salmo nella houtenae OX=59205 GN=entB PE=4 SV=1
MAIPKLQSYALPTALDIPTNKVSWAFEPERAALLIHDMQDYFVSFWGRNCPMMEQVIANIAALRQYCKEQHIPVYYTAQPKEQSDEDRALLNDMWGPGLTRSPEQQKVVEALTPDEADTVLVKWRYSAFHRSPLEQMLKDTGRNQLIITGVYAHIGCMTTATDAFMRDIKPFMVADALADFSREEHLMALNYVAGRSGRVVMTESLLPAPVPASKTALRALILPLLDETDEPLDDENLIDYGLDSVRMMGLAARWRKVHGDIDFVMLAKNPTIDAWWALLSREVQ

SEQ ID NO: 92870 - protein, 285 aa, Salmonella newport
  misc_feature (1)..(285): tr|A0A0H3BUA4|A0A0H3BUA4_SALNS Isochorismatase OS=Salmo nella newport (strain SL254) OX=423368 GN=entB PE=4 SV= 1
MAIPKLQSYALPTALDIPTNKVNWAFEPERAALLIHDMQDYFVSFWGRNCPMMDQVIANIAALRQYCKEHHIPVYYTAQPKEQSDEDRALLNDMWGPGLTRSPEQQKVVEALTPDEADTVLVKWRYSAFHRSPLEQMLKDTGRNQLIITGVYAHIGCMTTATDAFMRDIKPFMVADALADFSREEHLMALNYVAGRSGRVVMTESLLPTPVPASKAALRALILPLLDETDEPLDDENLIDYGLDSVRMMGLAARWRKVHGDIDFVMLAKNPTIDAWWALLSRGVE

SEQ ID NO: 92871 - protein, 285 aa, Salmonella schwarzengrund
  misc_feature (1)..(285): tr|A0A0N1QXT5|A0A0N1QXT5_SALSV Isochorismatase OS=Salmo nella schwarzengrund (strain CVM19633) OX=439843 GN=ent B PE=4 SV=1
MAIPKLQSYALPTALDIPTNKVNWAFEPERAALLIHDMQDYFVSFWGRNCPMMDQVIANITALRQYCKEHHIPVYYTAQPKEQSDEDRALLNDMWGPGLTRSPEQQKVVEALTPDEADTVLVKWRYSAFHRSPLEQMLKDTGRNQLIITGVYAHIGCMTTATDAFMRDIKPFMVADALADFSREEHLMALNYVAGRSGRVVMTESLLPTPVPASKAALRALILPLLDETDEPLDDENLIDYGLDSVRMMGLAARWRKVHGDIDFVMLAKNPTIDAWWALLSRGVE

SEQ ID NO: 92872 - protein, 285 aa, Salmonella sp.; identical to SEQ ID NO: 92870
  misc_feature (1)..(285): tr|A0A509CSG3|A0A509CSG3_9ENTR Isochorismatase OS=Salmo nella sp. NCTC 11881 OX=2583579 GN=entB PE=4 SV=1

SEQ ID NO: 92873 - protein, 285 aa, Salmonella typhimurium; identical to SEQ ID NO: 92870
  misc_feature (1)..(285): tr|Q8ZR31|Q8ZR31_SALTY 2,3-dihydro-2,3-dihydroxybenzoat e synthetase, isochorismatase OS=Salmonella typhimurium (strain LT2 / SGSC1412 / ATCC 700720) OX=99287 GN=entB PE=4 SV=1

SEQ ID NO: 92874 - protein, 67 aa, Schaalia cardiffensis
  misc_feature (1)..(67): tr|N6X4G2|N6X4G2_9ACTO Isochorismatase OS=Schaalia card iffensis F0333 OX=888050 GN=HMPREF9004_0851 PE=4 SV=1
MSWHRKSTTPFTIDLRELIVLSELSLSPPTQQDKSSPPGHRNPFLHPQHAYGQSRKRSLCSAPLHPA

SEQ ID NO: 92875 - protein, 204 aa, Schistosoma mansoni
  misc_feature (1)..(204): tr|G4LYG9|G4LYG9_SCHMA Isochorismatase family protein, putative OS=Schistosoma mansoni OX=6183 GN=Smp_000630 P E=4 SV=1
MSGISRVGKLLLPRTALLLCDIQEKFRPTISHFDAIVETSSRMLTAARMLGMRILVTEMYPKGLGPTVKELGDLNGIPIISKRSFTMLTDEVANILELRKQIDSVLLCGIETHVCVQSTALDLIERGIQVHCIVDAVSSRNMVDRMFGFQRMSQSGVYLTTCESALLTILCGSDHPQFRDIQKIILKPSPDSGLLTGFNTLKIS

SEQ ID NO: 92876 - protein, 243 aa, Segniliparus rotundus
  misc_feature (1)..(243): tr|D6ZCJ1|D6ZCJ1_SEGRD Isochorismatase OS=Segniliparus rotundus (strain ATCC BAA-972 / CDC 1076 / CIP 108378 / DSM 44985 / JCM 13578) OX=640132 GN=Srot_0551 PE=4 SV= 1
MSGFRRRELLVAGSALAASSLAGVFGGSEAGADVRPTGSISYPLDGLSIPKSLAPWGLDRSRAVLLVHDMQHYFVKPYRLGSDPMKTVLANAKSLLDTARASGIPVLYSGQPGGMTPEQRGLFLDLYGTGMPDDDAERAIVPPLERTSADVFITKSKISAFFHTDLLDTLRSLGRDQLVIVGVYTFSGVAATSMDALQNDIETFIAADATADYTLDEHRQALAWCAARTARVVTAQSIATALR

SEQ ID NO: 92877 - protein, 187 aa, Serinicoccus sp.
  misc_feature (1)..(187): tr|A0A1B1N8Q5|A0A1B1N8Q5_9MICO Isochorismatase OS=Serin icoccus sp. JLT9 OX=1758689 GN=SGUI_0369 PE=4 SV=1
MERVGPTAALVVIDVQQGFLDEEYWGRRNNPHSESNIAVLLDHWRATARPVVFVRHDSTSTTSPLHPDAPGNDFQPVVTGEPDLLVRKSVNSSFHGTPDLHAWLRQEGITELVLCGITTNHCCETTARVGGNLGLDVWFALDATHTFDRQDPDGELVTADTLSRVTATNLHGEFATVTTTQFLTSTP

SEQ ID NO: 92878 - protein, 284 aa, Serratia ficaria
  misc_feature (1)..(284): tr|A0A240AIX9|A0A240AIX9_SERFI Isochorismatase OS=Serra tia ficaria OX=61651 GN=entB PE=4 SV=1
MAIPKLNDYALPAADELPNNKVSWQLEPQRAALLIHDMQQYFLNFWGEDSALIKQVVENIAKLRSYCKQQGIPVFYTAQPNQQSDEDRALLNDMWGPGLNKHPEQQAVTAALAPDQDDTVLVKWRYSAFHRSPLQEILQESGRDQLIICGVYAHIGCLTTAIDAFMRNIQPFMVADGLADFSREEHLMALRYTAGRCGRVVTTASLLPGIASKEALRQQILPLLDEDSEDMGNDENLIDYGLDSVRIMELATRWRKIRGDIDFIALARNPTIDSWWALLSAERN

SEQ ID NO: 92879 - protein, 284 aa, Serratia fonticola
  misc_feature (1)..(284): tr|A0A448T0K5|A0A448T0K5_SERFO Isochorismatase OS=Serra tia fonticola OX=47917 GN=entB PE=4 SV=1
MAIPKLNDYALPTPSELPVNKVNWAFEPQRAALLIHDMQQYFLNFWGEDSPLIKQVVENIAALRRYCKQQGIPVFYTAQPNQQSDEDRALLNDMWGPGLNKHPEQQAVVSELAPDADDTVLVKWRYSAFHRSPLQESLQESGRDQLIICGVYAHIGCMTTAIDAFMRNIKPFMVADGLADFSREEHLMALRYTAGRCGRVVTTADLLPGIASIDALRQQIIPLLDEDSEDIGNDENLIDYGLDSVRIMELATRWRKIREDIDFIALAKSPTIDSWWALLSERKS

SEQ ID NO: 92880 - protein, 283 aa, Serratia liquefaciens
  misc_feature (1)..(283): tr|A0A484YYP7|A0A484YYP7_SERLI Isochorismatase OS=Serra tia liquefaciens OX=614 GN=entB PE=4 SV=1
MAIPKLQAYALPEASDIPANKVNWAFEPSRAALLIHDMQEYFLNFWGENSAMMEKVVANIAALRDFCKQNGIPVYYTAQPKEQSDEDRALLNDMWGPGLTRSPEQQQVIAALAPDEDDTVLVKWRYSAFHRSPLEEMLKETGRDQLIITGVYAHIGCMTTATDAFMRDIKPFFVADALADFSREEHLMALKYVAGRSGRVVMTEELLPLPASKAALRALILPLLDESDEPLDDENLIDYGLDSVRMMALAARWRKVHGDIDFVMLAKNPTIDAWWALLTREVH

SEQ ID NO: 92881 - protein, 286 aa, Serratia marcescens
  misc_feature (1)..(286): tr|A0A0P0Q9A1|A0A0P0Q9A1_SERMA Isochorismatase OS=Serra tia marcescens OX=615 GN=entB PE=4 SV=1
MAIPKLNDYALPTADELPQNKVTWQVEPQRAALLIHDMQQYFLNFWGEDSALIKQVVENIANLRRYCKQQGIPVFYTAQPNQQSDEDRALLNDMWGPGLNKHPEQQAVTAALAPDEDDTVLVKWRYSAFHRSPLQEILQESGRDQLIICGVYAHIGCLTTAIDAFMRNIQPFMVADGLADFSRDEHLMALRYTAGRCGRVVTTASLLPAAGIASIDALRQQILPLLDEDSEDMGNDENLIDYGLDSVRIMELATRWRKIRSDIDFIALARNPTIDSWWALLSEEKA

SEQ ID NO: 92882 - protein, 284 aa, Serratia odorifera
  misc_feature (1)..(284): tr|D4E3D4|D4E3D4_SEROD Isochorismatase OS=Serratia odor ifera DSM 4582 OX=667129 GN=entB PE=4 SV=1
MAIPKLNDYALPTAAEMPANKVNWAFEPQRAALLIHDMQQYFLNFWGEDSALIKQVVDNIANLRRYCKAQGIPVFYTAQPNEQSAEDRALLNDMWGPGLNKHPEQQAVVAALAPDADDTVLVKWRYSAFHRSPLQDILQESGRDQLIICGVYAHIGCLTTAIDAFMRNIKPFMVADGLADFSRDEHLMALRYTAGRCGRVVATADLLPGIASKDALRQQILPLLDEDSDDMANDENLIDYGLDSVRIMELATRWRKIRSDIDFIALAKSPTIDSWWALLSGEKA

SEQ ID NO: 92883 - protein, 284 aa, Serratia plymuthica
  misc_feature (1)..(284): tr|A0A2X4V7R4|A0A2X4V7R4_SERPL Isochorismatase OS=Serra tia plymuthica OX=82996 GN=entB PE=4 SV=1
MAIPKLNDYALPTQAELPTNKVSWTVEPQRAALLIHDMQQYFLNFWGEDSPLIKQVVENIANLRRYCKSQGIPVFYTAQPNQQSDEDRALLNDMWGPGLNKHPEQQAVVQALAPEDDDTVLVKWRYSAFHRSPLQEILQESGRDQLIICGVYAHIGCMTTAIDAFMRNIQPFMVADGLADFSRDEHLMALRYTAGRCGRVVTTAELLPGIASKAALRLQIMPFLDEDSEDMGDDENLIDYGLDSVRIMELAARWRKIRSDIDFIALAKSPTIDSWWAMLSQEKS

SEQ ID NO: 92884 - protein, 284 aa, Serratia proteamaculans
  misc_feature (1)..(284): tr|A8GHC7|A8GHC7_SERP5 Isochorismatase OS=Serratia prot eamaculans (strain 568) OX=399741 GN=Spro_3419 PE=4 SV= 1
MAIPKLNDYALPTQAELPTNKVSWTVEPQRAALLIHDMQQYFLNFWGEDSPLIKQVVENIANLRRYCKSQGIPVFYTAQPNQQSDEDRALLNDMWGPGLNKHPEQQAVVAALAPEEDDTVLVKWRYSAFHRSPLQEILQESGRDQLIICGVYAHIGCMTTAIDAFMRNIQPFMVADGLADFSREEHLMALRYTAGRCGRVVTTAELLPGIASKAALRQQIMPFLDEDSEDMGDDENLIDYGLDSVRIMELAARWRKIRGDIDFIALAKNPTIDGWWTLLSEGKA

SEQ ID NO: 92885 - protein, 284 aa, Serratia quinivorans
  misc_feature (1)..(284): tr|A0A380ADN6|A0A380ADN6_9GAMM Isochorismatase OS=Serra tia quinivorans OX=137545 GN=entB PE=4 SV=1
MAIPKLNDYALPTQAELPTNKVSWTVEPQRAALLIHDMQQYFLNFWGEDSPLIRQVVENIANLRRYCKSQGIPVFYTAQPNQQSDEDRALLNDMWGPGLNKHPEQQAVVAALAPEEDDTVLVKWRYSAFHRSPLQEILQESGRDQLIICGVYAHIGCMTTAIDAFMRNIQPFMVADGLADFSREEHLMALRYTAGRCGRVVTTAELLPGIASKAALRQQIMPFLDEDSEDMGDDENLIDYGLDSVRIMELAARWRKIRGDIDFIALAKNPTIDGWWTLLSEGKA

SEQ ID NO: 92886 - protein, 288 aa, Serratia rubidaea
  misc_feature (1)..(288): tr|A0A2X5DCR7|A0A2X5DCR7_SERRU Isochorismatase OS=Serra tia rubidaea OX=61652 GN=entB PE=4 SV=1
MAIPKLNDYALPTAAELPANKVNWTVEPQRAALLIHDMQQYFLNFWGEDSPMIKQVVENIANLRRYCKSQGIPVFYTAQPNQQSDEDRALLNDMWGPGLNKHPEQQAVVAALAPEEDDTVLVKWRYSAFHRSPLQDILQETGRDQLIICGVYAHIGCLTTSIDAFMRNIQPFMVADGLADFSRDEHLMALRYTAGRCGRVVSTAELLPQSNAIASKEALRAMILPLLDEDSEDMGNDENLIDYGLDSVRIMELATRWRKIRGDIDFIALAKNPTIDSWWALLAGEQAG

SEQ ID NO: 92887 - protein, 267 aa, Serratia symbiotica
  misc_feature (1)..(267): tr|A0A068Z177|A0A068Z177_9GAMM Isochorismatase OS=Serra tia symbiotica OX=138074 GN=entB PE=4 SV=1
MEPKRCALLIHDMQNYFLNFWDEQSPMIRQVIANLVALRERGHQLGIPVFYTGMPNHQQPEDRALLNDMWGPGLNRHPEQQQFVEPLAPAEQDTVLVKWRYSAFQRSDLESRLRELKRDQLIIGGVYAHIGCLTTATDAFMRDIQPFMVADALADFSQQEHEMALRYTAGRSGRILSTEAALAELKASDDRAWNKEKLLALLANALDEDTEALADDDNLLDYGLDSVRIMSLASHWRKEGHKLNFVALVKQPTLKAWLTLLNARQEA

SEQ ID NO: 92888 - protein, 180 aa, Shewanella sp.
  misc_feature (1)..(180): tr|F7RIV2|F7RIV2_9GAMM Isochorismatase OS=Shewanella sp . HN-41 OX=327275 GN=SOHN41_00282 PE=4 SV=1
MLKPEKCVLVIVDVQGKLAQIMDKTEKLHQQLQTLIQGAQLFDIPILWLEQLPDKLGSTSPELKTLLENTTTPIAKQHFSGWHCEAFAQALIKTNRQHVILAGIETHVCVYQTCCDLIEQQYSVHLVADGVSSRSADNKQLGIQMMTARGALLTNVESLLFELQHQAQGERFRALIKLIK

SEQ ID NO: 92889 - protein, 285 aa, Shigella boydii
  misc_feature (1)..(285): tr|I6ESG2|I6ESG2_SHIBO Isochorismatase OS=Shigella boyd ii 4444-74 OX=766140 GN=entB PE=4 SV=1
MAIPKLQAYALPESHDIPQNKVDWAFELQRAALLIHDMQDYFVSFWGENCPMMEQVIANIAALRDYCKQHNIPVYYTAQPKEQSDEDRALLNDMWGPGLTRSPEQQKVVDRLTPDADDTVLVKWRYSAFHRSPLEQMLKESGRNQLIITGVYAHIGCMTTATDAFMRDIKPFMVADALADFSRDEHLMSLKYVAGRSGRVVMTEELLPAPVPASKAALREVILPLLDESDEPFDDDNLIDYGLDSVRMMALAARWRKVHGDIDFVMLAKNPTIDAWWKLLSREVK

SEQ ID NO: 92890 - protein, 222 aa, Shigella dysenteriae
  misc_feature (1)..(222): tr|B3WZW2|B3WZW2_9ENTR Isochorismatase OS=Shigella dyse nteriae 1012 OX=358708 GN=Sd1012_3996 PE=4 SV=1
MAIPKLQAYALPEPHDIPQNKVDWAFEPQRAALLIHDMQDYFVSFWGENCPMMEQVIANIAALRDYCKQHNIPVYYTAQPKEQSDEDRALLNDMWGPGLTRSPEQQKVVDRLTPDADDTVLVKWRYSAFHRSPLEQMLKESGRNQLIITGVYAHIGCMTTATDAFMRDIKPFMVADALADFSRDEHLMSLKYVAGRSGRVVMTEELLPALGPASKAALREVK

SEQ ID NO: 92891 - protein, 285 aa, Shigella flexneri; identical to SEQ ID NO: 92889
  misc_feature (1)..(285): tr|K0XCF6|K0XCF6_SHIFL Isochorismatase OS=Shigella flex neri 1485-80 OX=766155 GN=dhbB PE=4 SV=1

SEQ ID NO: 92892 - protein, 285 aa, Shigella sonnei
  misc_feature (1)..(285): tr|A0A0I1LXU9|A0A0I1LXU9_SHISO Enterobactin biosynthesi s bifunctional isochorismatase/aryl carrier protein Ent B OS=Shigella sonnei OX=624 GN=entB PE=4 SV=1
MAIPKLQAYALPESHDIPQNKVDWAFEPQRAALLIHDMQDYFVSFWGENCPMMEQVIANIAALRDYCKQHNIPVYYTAQPKEQSDEDRALLNDMWGPGLTRSPEQQKVVDRLTPDADDTVLVKWRYSAFHRSPLEQMLKESGRNQLIITGVYAHIGCMTTATDAFMRDIKPFMVADALADFSRDEHLMSLKYVAGRSGRVVMTEGLLPAPVPARKAALREVILPLLDESDEPFDDDNLIDYGLDSVRMMALAARWRKVHGDIDFVMLAKNPTIDAWWKLLSREVK

SEQ ID NO: 92893 - protein, 204 aa, Sinorhizobium americanum
  misc_feature (1)..(204): tr|A0A1L3LCW5|A0A1L3LCW5_9RHIZ Isochorismatase OS=Sinor hizobium americanum CCGM7 OX=1408224 GN=SAMCCGM7_pC0686 PE=4 SV=1
MTDHAANAAAEKSALILIEYVNDWLAPTGGINGQFQDREQFDLAVANSKEVLEEARRRNMDVIHVTVRFEPTYKVLGEGKYGLRKMMLDYRSFLGEQADFFPGFEPQDGEFVVSERPGGSSAFAGTTLDSYLRNNRIFDIYVMGFALRQCVESTVRNAHDLGYHTNVIYDASAAFTRKQQTSFLSDIAPFYANAVTTREFLTQA

SEQ ID NO: 92894 - protein, 238 aa, Sinorhizobium fredii
  misc_feature (1)..(238): tr|Q6W1P7|Q6W1P7_SINFN Isochorismatase OS=Sinorhizobium fredii (strain NBRC 101917 / NGR234) OX=394 GN=NGR_b03 960 PE=4 SV=1
MNSLGSLPITSHKLSHIDADPYPWPYNGDLRPENTALIIIDMQTDFCGPGGYVDHMGYDLSLVRAPIEPIRKVLSAMRAKGYHIIHTREGHRPDLADLPANKRWRSQRIKAGIGDAGPCGRILVRGEPGWEIIDALKPIQGETIIDKPGKGSFCATDLELILNQKRIDNIVLTGITTDVCVHTTMREANDRGFECLLLEDCCGATDYGNHLAAIKMVKMQGGVFGSVSNSATLVGQLP

SEQ ID NO: 92895 - protein, 180 aa, Snodgrassella alvi
  misc_feature (1)..(180): tr|A0A066THK6|A0A066THK6_9NEIS Isochorismatase OS=Snodg rassella alvi OX=1196083 GN=BGI29_00570 PE=4 SV=1
MLIDSKRSTVLMIDLQTRLLPALNNTDEVLANNIWLAGLAHDMAIPTLISEHCVDKIGATHEEIMTAAPQAKIVQKQNFSVFSAGVLTKDNLQQANQIIISGIEAHICVLQTAFDLCAHGYEVFVVADAVSSRRQRDVELGLARMQTSGCQIVSREMIAFEWLGSANNPQFKEIHKKYIR

SEQ ID NO: 92896 - protein, 221 aa, Solibacillus isronensis
  misc_feature (1)..(221): tr|K1KRU0|K1KRU0_9BACL Isochorismatase OS=Solibacillus isronensis B3W22 OX=1224748 GN=dhbB_2 PE=4 SV=1
MAIPAISSYKMPKESNLPKNKVGWKVDPNKSVLLIHDMQQYFIDYYEKDSSLVREMIANIKVIRKQCDELGIPVVYTAQSGNQNPEERALLTDFWGTGLKDDPNITKVIDELAPGKADIVLKKWRYSAFKKSNLLEMMNEQGRDQLIICGVYAHIGCLMTAGEAFMSDIKPFFIADAVADFTQPEHEMAINYVAGRCGAVYSTAQIMDQLKREASAEAELV

SEQ ID NO: 92897 - protein, 219 aa, Sorangium cellulosum
  misc_feature (1)..(219): tr|A9GA70|A9GA70_SORC5 Isochorismatase OS=Sorangium cel lulosum (strain So ce56) OX=448385 GN=sce2665 PE=4 SV=1
MIGGDRCPTRRRPQYITAHDMPRRSHDLHGAAPDDSRTALLLIDVINDLDFPGGDRLLAHALPMAHRIRALKQRCRDAGIPAVYVNDNFGRWQSNFHRQIEHCLEEGVRGREIAALLRPGEDDYFVLKPKHSGFYGTTLEILLESLGAQTLLLTGMAGNICVLFTANDAYMRDYRLLVPSDCVASETEEDNGHALRQMQRFLKADITPSDELDLERLPA

SEQ ID NO: 92898 - protein, 204 aa, Sphingobium japonicum
  misc_feature (1)..(204): tr|N1MN06|N1MN06_9SPHN Isochorismatase OS=Sphingobium j aponicum BiD32 OX=1301087 GN=EBBID32_26920 PE=4 SV=1
MDVKKTAVLLIEYQNDFTTEGGAQHAAVQAVMDTTGMMRHSRALLDAARARGVTVLHAPISFAEGYPEIPVHPYGILAGVVGAKAFRKGSWGAEIAAEMAPVEGEIVIEGKRGLDCFASTNLDFILRQRGITDLAIGGFLTNCCVESTMRSAYERGYRVVTLTDCTATLSAAEQTAAVEKNFPMFSHPLTHDAFLAELDQGAVS

SEQ ID NO: 92899 - protein, 195 aa, Sphingomonas dokdonensis
  misc_feature (1)..(195): tr|A0A245ZUC1|A0A245ZUC1_9SPHN Vibriobactin-specific is ochorismatase OS=Sphingomonas dokdonensis OX=344880 GN= vibB PE=4 SV=1
MNGKAAILIIDLLNTFDFDGGDALKEIVAEMVAPLREFRQQARAAKVPVIFVNDNYGRWHDEPSQLIAFAIAGKGGHVIRQLAPEQGDYFVIKPESSGFYATTLPALLPRLGVSRLVVIGVAADICVLFTAADAHMREYDLWVPRDLVASHHDERARWALEMMQNGMSAEIRPTSELSLADWLATTPKVRAGHTG

SEQ ID NO: 92900 - protein, 195 aa, Sphingomonas mucosissima
  misc_feature (1)..(195): tr|A0A245ZG02|A0A245ZG02_9SPHN Isochorismatase OS=Sphin gomonas mucosissima OX=370959 GN=dhbB PE=4 SV=1
MNGKAAILVIDLLNTFDFTGGDTLKDQVSAMVDPLRSLRQHAKSADVPVIFVNDNYGRWHDEPSELVAFASEGKGGPLIAQLKPEEDDYFVIKPESSGFYATTLPALLPRLGVTRLVLVGVAADICVLFTAADAHMREYDLWVPRDLVASQHEERAGWALEMMENGMSAKTRPTSELSLADWLASAPKVRQGRAD

SEQ ID NO: 92901 - protein, 219 aa, Sphingomonas sp.
  misc_feature (1)..(219): tr|A0A0D4ZZG8|A0A0D4ZZG8_9SPHN Isochorismatase OS=Sphin gomonas sp. JE1 OX=1628059 GN=pJE1_013 PE=4 SV=1
MVEENKTARQLFEEVMANPERAKFGFGRKLAIVNVDPQKAYTCIDEFKTAYETDPRQIEYINSISSLARAKGMPVIWTHVAYAEDGSDCGIWGTRTNTPDSLQNIKYGSRRYEFDDRCEIDPKDMVYTKRMPSAFFETPLQSLLVYHGVDTVVVTGGSTSGCVRATAVDALSRGYRTIVPIETCADKHESFHFANLTDLAIKYADVEPVQTVIDWLEAQ

SEQ ID NO: 92902 - protein, 212 aa, Sphingopyxis sp.
  misc_feature (1)..(212): tr|A0A0M9TZY2|A0A0M9TZY2_9SPHN Isochorismatase OS=Sphin gopyxis sp. C-1 OX=262667 GN=SC1_03664 PE=4 SV=1
MALPTYKRASTALLFIDPYNDFLSEGGKAWPRVGPIAEEIGLLDNLRAIVAAVRNAGIQVVIAPHRRWEPGDYEDWDHPNPTQIGIMSRHSFARGEWGGEWHPDFVPESGDIVAKEHWGQSGFANTDLDQQLRQRGITHVILIGLLANTCVESTGRYAMEIGYHVTLVRDATAAYSKEMMHAAHELNGPTYAHAILTTAELLEAIAAAGVDR

SEQ ID NO: 92903 - protein, 81 aa, Sporolactobacillus inulinus
  misc_feature (1)..(81): tr|A0A4Y1ZBX8|A0A4Y1ZBX8_9BACL Isochorismatase OS=Sporo lactobacillus inulinus OX=2078 GN=NBRC111894_1732 PE=4 SV=1
MIAGCQTEYCIDTAVRMATVNGFDVTLVGDAHGTADTPVLSAEQIVKHHNQTLNGYDNDDHFSLVRNSDEALFQPIHERYR

SEQ ID NO: 92904 - protein, 225 aa, Sporomusa sp.
  misc_feature (1)..(225): tr|A0A0U1L4A6|A0A0U1L4A6_9FIRM Isochorismatase OS=Sporo musa sp. An4 OX=411922 GN=SpAn4DRAFT_0176 PE=4 SV=1
MKKHLEITIRQIINQKILSFDERQACLMNERLLKETALIIIDVQKAIDNPVWFQYGARNNLNAENNMTEILNLWRKSGQPIFHVKHESNELNSTYRPGQAGCNFKECVAPLEGEHIIVKHVNSAFIGTGLESMLKKLNVSCVVIFGVITNNSVDASVRMSGNLGFITYLVEDACFTYAKPDFCGCVRTADEVHAMTLSNLDNEYCQVISTYNLKKILTGNTTKIP

SEQ ID NO: 92905 - protein, 178 aa, Sporomusa sphaeroides
  misc_feature (1)..(178): tr|A0A1U7MEP0|A0A1U7MEP0_9FIRM Vibriobactin-specific is ochorismatase OS=Sporomusa sphaeroides DSM 2875 OX=1337 886 GN=vibB PE=4 SV=1
MRITKEDSLVLLIDVQEKLYPHMNNKEKLSQKTITLLKGITALGIPLTAARQYPQGLGDIIEELRPYGSECYDKVTFSCCGNDNLIARLRESGCKYVIIAGIEAHICVLQTVIDLKALGYLPVVVTDAISSREQQDYEIALRRMEYKGAILTTVESILFELCREAGNEVFKTISRLVK

SEQ ID NO: 92906 - protein, 179 aa, Sporomusa termitida
  misc_feature (1)..(179): tr|A0A517DUL3|A0A517DUL3_9FIRM Vibriobactin-specific is ochorismatase OS=Sporomusa termitida OX=2377 GN=vibB PE =4 SV=1
MRIEKENALLLVVDMQEKLFPHINRHQELIKKTLILLAGLKALAVPMMAARQYPRGLGDTIEELRPYFTTGYWDKLTFSCCGSEPLLAQLQGSGRKAVIIAGIEAHICVLQTVIDLKEHGLVPVVVTDAVGSRTDRDYEIALRRMEQAGAVLTTVESILFELCRQAGSEAFKTISKLVK

SEQ ID NO: 92907 - protein, 185 aa, Sporosarcina newyorkensis
  misc_feature (1)..(185): tr|F9DMZ9|F9DMZ9_9BACL Isochorismatase OS=Sporosarcina newyorkensis 2681 OX=1027292 GN=pncA PE=4 SV=1
MMELKKALLVVDYTVDFVAIDGALTCGEPGIALENHIVQLTKDFLAQQQPVFVINDLHEKDDPYHPENALFPAHNIRGTFGRNLYGKMHDLYSEHSDEIIWMDKTRYSAFAGTDLDIQLRARDIREIHLTGVCTDICILHTAIDAYNLGYKIFIHEGGVASFNPAGHDWALSHFQNTLGATVISN

SEQ ID NO: 92908 - protein, 270 aa, Stackebrandtia nassauensis
  misc_feature (1)..(270): tr|D3Q5B3|D3Q5B3_STANL Isochorismatase OS=Stackebrandti a nassauensis (strain DSM 44728 / NRRL B-16338 / NBRC 1 02104 / LLR-40K-21) OX=446470 GN=Snas_4517 PE=4 SV=1
MSIPTLDIYPLPTEAELPKPRVPWTFDPNRAALLIHDMQRYFLDFYGEEFGELVDNIAQLRKLDLPTFYTAQPPKQSPDERGLLSDRWGPGIQDREDIVAPLAPASSDVVLTKHRYSAFHRTDLAERLAAAGRDQLIITGVYAHIGITATALDAFSHGIETFVIADAIADFGRGRHVAALEHLSATCAVVTTLNRLLDSGFGLADVRAQVLALLDEPADDDENLIDAGLDSIRVMGLIEDWKERGHNVTFADLAADPTIRGFHAALEAAR

SEQ ID NO: 92909 - protein, 165 aa, Staphylococcus aureus
  misc_feature (1)..(165): tr|A0A0H2WYH7|A0A0H2WYH7_STAAC Isochorismatase OS=Staph ylococcus aureus (strain COL) OX=93062 GN=entB PE=4 SV= 1
MDYAPYTAENVVQNANKLIDVFRKNNGFIAFVRVNFYDGKDVLQPNAMISLPPKEGDDYSRFHHLLDKRDDDFVIDKRHFSAFVGTDLDLQLRRRGIDTIVLGGVATHIGVDTTARDAYQLNYNQFFVTDMMSAQNETLHQFPIDNVFPLMGQTITTNDFLNILN

SEQ ID NO: 92910 - protein, 186 aa, Staphylococcus schweitzeri
  misc_feature (1)..(186): tr|A0A2K4AHG5|A0A2K4AHG5_9STAP Cysteine hydrolase OS=St aphylococcus schweitzeri OX=1654388 GN=entB PE=4 SV=1
MSRKSALLVLDMQEGIASSVPRIKNIVKANQRAIEAARQHRIPVIFIRLVLDKHFNDVSSSNKVFSTIKAQGYAITETDASTRILESLDPLEDEPIISKRRFSAFTGSYLEVYLRANDINHLVLTGVSTSGAVLSTALESVDKDYYITVLEDAVGDRSDDKHDFIIEQILSRSCEIESVESWKSSL

SEQ ID NO: 92911 - protein, 218 aa, Starkeya novella
  misc_feature (1)..(218): tr|D7A8S2|D7A8S2_STAND Isochorismatase OS=Starkeya nove lla (strain ATCC 8093 / DSM 506 / CCM 1077 / IAM 12100 / NBRC 12443 / NCIB 9113) OX=639283 GN=Snov_3332 PE=4 S V=1
MTAKLGGKPGLPTVAPYDLPRADELPKPRAPWKLDRDRAALLIHDMQNYFLRIFDADAAPIAPVIANIAALAKAARAAGVPVFYTAQEGNQDRRDRGLQADLWGPGMSAAPEHQPVVAPLAPEPGDFVLVKHRYSAFQRSNLEALMRARGRDQLIICGVYAHIGCTLTAADAFMRDIEPFMAADALADFSRAKHDLALSYAADVCAVPLMTAAILEVL

SEQ ID NO: 92912 - protein, 211 aa, Stenotrophomonas maltophilia
  misc_feature (1)..(211): tr|B4SLS4|B4SLS4_STRM5 Isochorismatase OS=Stenotrophomo nas maltophilia (strain R551-3) OX=391008 GN=Smal_2274 PE=4 SV=1
MALPRITNYSLPTAAELPQARGPWRPQRDRVALLVHDMQRYFLAAFDARNAPLRPAVDNIVRLLAHCRAHGIPVFYTAQHGDQDRRDRGLQADLWGPGMRRSADHEPIIEALAPQPGEHVLVKHRYSAFQRSNLETLMRVRGRDQLLVTGVYAHIGCTATVVEAFQRDIEAFIAADAVADFSRADHDQALHWIARTCGVPMTTDQLLEVLR

SEQ ID NO: 92913 - protein, 146 aa, Stenotrophomonas sp.
  misc_feature (1)..(146): tr|B8L5H2|B8L5H2_9GAMM Isochorismatase hydrolase OS=Ste notrophomonas sp. SKA14 OX=391601 GN=SSKA14_1398 PE=4 S V=1
MLIDFQSQMAFATHTIDISALRNNVSLISKGAKGFSVPVLLTTVAETSFSGPMFPELPEIFPGQPVFDRTSMNTWEDQAVIAEINRIGKRRLVLAGLWTSVCIVGPALSALAQGFEVHVITDACGDVSEEAHERAITRMVQAAQCR

SEQ ID NO: 92914 - protein, 310 aa, Stigmatella aurantiaca
  misc_feature (1)..(310): tr|Q096Z5|Q096Z5_STIAD Isochorismatase OS=Stigmatella a urantiaca (strain DW4/3-1) OX=378806 GN=mxcF PE=4 SV=1
MALPAIAPYRMPSAADLPANKVSWTPDSQRSVLLIHDMQRYFVDAFTSGASPVTELVANIRQLRQHCISLGIPVVYSAQPGGQTPEQRGLLLDFWGAGINGGPHQKQIIDALAPAEGDIVLTKWRYSAFNRTQLMDILRQGKRNQLIICGIYAHIGCLQTASEAFMNEVQPFFVADGVADFSWENHQMALNYAARLCAVTTTTQQLIEQLRPQAIRGGAPLSRQQIRADVVELLQQDAALGDDENLLERGLDSIRLMSLVERWRNTGAEVTFVELAERPTLTDWYAMLTSTAQPPVEVAAAFQRGVRPTA

SEQ ID NO: 92915 - protein, 186 aa, Streptococcus acidominimus
  misc_feature (1)..(186): tr|A0A239WEV8|A0A239WEV8_STRAI Isochorismatase OS=Strep tococcus acidominimus OX=1326 GN=entB PE=4 SV=1
MKRALMLIDIQNTFRDGSWGPRNNDSAEEQSARLLAYFRETKELVIHVNHISKSPESRFFHQGEGFDFQDMVRPLEGELVISKTVNSAFIGTKLKEYLDDNKVDTLIIAGLTTPHCVSTTTRMAGNYGFATYLVEDATAAFDLRDPKGNIIPAQTIHEISLATLHDEFATIVTTEAVINEEYSKEI

SEQ ID NO: 92916 - protein, 173 aa, Streptococcus agalactiae
  misc_feature (1)..(173): tr|A0A380IYH5|A0A380IYH5_STRAG Isochorismatase OS=Strep tococcus agalactiae OX=1311 GN=NCTC9828_00821 PE=4 SV=1
MTCALLLIDIQQGIMDKKPKHLTNFAELLDDLLLSAKGPNCEVIWIRHHDKELPQGSLQWEIWEQRHLVTHHKIIDKTYNSCFKDTHLHDYLQSKHISQLIMMGLQTEYCFDTSVKVAFEYGYNIFIPQGGHLTFDTPTLSGDSIKKHYENIWHHRFATMVAKDSLLKLINEE

SEQ ID NO: 92917 - protein, 170 aa, Streptococcus anginosus
  misc_feature (1)..(170): tr|A0A4U9ZTK0|A0A4U9ZTK0_STRAP Isochorismatase OS=Strep tococcus anginosus OX=1328 GN=rutB PE=4 SV=1
MKTALLVIDIQTALIEAKPYAVDNCLSVWQKAIATCREKNIEVIYVRHNDDELLTGSHGWEIYGAIAPEVGEKIFDKHYNSAFKETHLQTYLDSQAIERLIIIGMATNYCIDTTVKVAFEFGYNLAVVKNGTTTFAEREITAEQLIQYYENAWNGRFAQVADLEEILKED

SEQ ID NO: 92918 - protein, 174 aa, Streptococcus cristatus
  misc_feature (1)..(174): tr|A0A139MXB0|A0A139MXB0_STRCR Isochorismatase OS=Strep tococcus cristatus OX=45634 GN=SCRDD08_01981 PE=4 SV=1
MTQALIVVDIQEGLINLGPANKEPFIATVKQTIASFEEAGKEVIYIRHTEAEGFLSEGDASWQVYHELSPRPQDRIFNKNFNSMYRGTELKAYLDSKGITSYSVVGMQAEFCIDTSLKVGFEYGFEQVLVRDAVTTFDNDHLPAQKIIDFYQDHIWDNRFAKVLPVETIQAANK

SEQ ID NO: 92919 - protein, 170 aa, Streptococcus dysgalactiae
  misc_feature (1)..(170): tr|A0A4V0DRG7|A0A4V0DRG7_STRDY Isochorismatase OS=Strep tococcus dysgalactiae OX=1334 GN=rutB PE=4 SV=1
MKKALLVIDCQKALVEAKPYAIAACLRTWQRAIQKARCQGMEVIYVRHQDDDLVFGSGGWEIHESLTPQSSEKIVDKSYNSAFKATGLAAYLNQKGIDNLVMIGMLTNYCMDTTVRVAFELGYEVSVIEHGSTTFDDEDIQASLLIDYHESLWDGNFARVEPLDVILNEE

SEQ ID NO: 92920 - protein, 170 aa, Streptococcus equinus
  misc_feature (1)..(170): tr|A0A447UAN2|A0A447UAN2_STREI Isochorismatase OS=Strep tococcus equinus OX=1335 GN=yecD PE=4 SV=1
MKTALLVIDIQTALIEAKPYAVDNCLSVWQKAIATCREKNIEVIYVRHNDDELLTGSHGWKIYEAIAPEVDEKIFDKHYNSAFKETHLQTYLDSQAIERLIIIGMATNYCIDTTVKVAFEFGYDLAVIKNGTTTFAEREITAEQLIQHYESTWNGRFAQVADLEEILKED

SEQ ID NO: 92921 - protein, 185 aa, Streptococcus ferus
  misc_feature (1)..(185): tr|A0A2X3VN58|A0A2X3VN58_9STRE Isochorismatase OS=Strep tococcus ferus OX=1345 GN=yecD_1 PE=4 SV=1
MRKALLLIDIQKTFRDGSWGGRNNDAAENNASRLLASFREHGDLVIHVQHKSQNPNSRFYVKNEGVGFQDSVLPLDGEQLISKSVNSAFIGTHLQDYLEENGVSTLVIAGLTTPHYVSTTTRMASNLGYKTYLVEDATASFALQNHQGKTFSPQDVQEISLATLHDEFAVIVSTDDVIKHYHQLN

SEQ ID NO: 92922 - protein, 170 aa, Streptococcus gallolyticus
  misc_feature (1)..(170): tr|F5WWP6|F5WWP6_STRG1 Isochorismatase OS=Streptococcus gallolyticus (strain ATCC 43143 / F-1867) OX=981539 GN =SGGB_1847 PE=4 SV=1
MKTALLVVDIQTALIEAKPYAVDNCLSVWQKAIATCREKNIEVIYVRHNDDELLTGSHGWEIYEAIAPEVDEKIFDKHYNSAFKETHLQPYLDSQVIERLIIIGMATNYCIDTTVKVAFEFGYNLAVIKNGTTTFAEREITAEQLIQHYESTWNGRFAQVADLEEILKED

SEQ ID NO: 92923 - protein, 174 aa, Streptococcus gordonii
  misc_feature (1)..(174): tr|A0A139N158|A0A139N158_STRGN Isochorismatase OS=Strep tococcus gordonii OX=1302 GN=SGODD07_01723 PE=4 SV=1
MTQALIVVDIQEGLINLGPANKEPFIATVKQTVASFEEAGKEVIYIRHTEAEGFLSEGDASWQVYHELSPRPQDRIFNKNFNSMYRGTELKAYLDSEGITSYAVVGMQAEFCIDTSLKVGFEYGFEQVLVRDAVTTFDNDHLPAQKIIDFYQDHIWDNRFAKVLPVETVQAANK

SEQ ID NO: 92924 - protein, 191 aa, Streptococcus infantis
  misc_feature (1)..(191): tr|J1SCU1|J1SCU1_9STRE Isochorismatase OS=Streptococcus infantis SPAR10 OX=1159208 GN=entB PE=4 SV=1
MAKALISIDYTEDFVADHGKLTAGAPAQAISDNIYHVTQKAFERGDYIFFTIDAHEENDVFHPESKLFPPHNIIGTSGRNLYGKLAEFYQEYADDSRVFWMDKRHYSAFSGTDLDIRLRERRVDTVILTGVLTDICVLHTAIDAYNLGYQIEVVKPAVASIWPENHAFALGHFKNTLGAKLVDENLLEITE

SEQ ID NO: 92925 - protein, 141 aa, Streptococcus lutetiensis
  misc_feature (1)..(141): tr|A0A2X3WFY1|A0A2X3WFY1_9STRE Isochorismatase OS=Strep tococcus lutetiensis OX=150055 GN=NCTC8738_01760 PE=4 S V=1
MKTALLVIDIQTALIEAKPYVVDNCLSVWQKAIATCREKNIELIYVRHNDDELLTGSHGWKIYEAIAPEVDEKIFDKHYNSAFKETHLQTYLDSQAIERLIIIGMATNYCIDTTVKVAFEFGYDLKMARLPLLKEKLQQNN

SEQ ID NO: 92926 - protein, 170 aa, Streptococcus milleri; identical to SEQ ID NO: 92917
  misc_feature (1)..(170): tr|A0A3S4MCY2|A0A3S4MCY2_9STRE Isochorismatase OS=Strep tococcus milleri OX=33040 GN=rutB PE=4 SV=1

SEQ ID NO: 92927 - protein, 166 aa, Streptococcus mitis
  misc_feature (1)..(166): tr|A0A139QCC6|A0A139QCC6_STRMT Isochorismatase OS=Strep tococcus mitis OX=28037 GN=SMIDD28_00386 PE=4 SV=1
MKTAFIIIDVQNILVETGFKTERLLEKISYLQNQARSKNIEIIYVQHIENAEAQTSEDWQLSELLSRKPDEKVFQKKYNSIFKETGLKEYLDKQGIEKLVLCGMQTEYCVDTSVKVAFEYGYQLIIPEGAVTTFDGDDIPAETINEFYEDIWEDRFADVLDYKNIF

SEQ ID NO: 92928 - protein, 191 aa, Streptococcus oralis
  misc_feature (1)..(191): tr|A0A139QSI8|A0A139QSI8_STROR Isochorismatase OS=Strep tococcus oralis OX=1303 GN=SORDD24_00757 PE=4 SV=1
MTQTTLLIIDMQQAFEKDAWGERNNPHAEEKALQVLQFFRKHKLPICHIQHVSSNPCSLFYTKQGQAFKNRFEPIAGEIIFQKTVNSAFIGTGLEQYLHEQKVSQLVIVGLTLPHCISTTTRMASNLGFKVTLLADATASFSLPDRNGQLVHPDIIHNVNLISLQNEFAQILDTDKFLTYSQNNPLTLPRV

SEQ ID NO: 92929 - protein, 166 aa, Streptococcus parasanguinis
  misc_feature (1)..(166): tr|A0A359YHI9|A0A359YHI9_STRPA Isochorismatase OS=Strep tococcus parasanguinis OX=1318 GN=SPADD19_00722 PE=4 SV =1
MKTAFIIIDVQNILVETGFETEKLLEKIAYLQEQARKQQVEIIYMQHIETPEALTSEDWQLSPLLKRQADEKVFQKRYNSIFKETGLKEYLDQQGIEQLVLCGMQTEYCVDTSVKVGFEYGYKLVIPEGAVTTFDGEDIPAETLNEFYENIWAERFADVLDYQSIF

SEQ ID NO: 92930 - protein, 285 aa, Streptococcus pneumoniae; identical to SEQ ID NO: 92562
  misc_feature (1)..(285): tr|A0A4U9M1X1|A0A4U9M1X1_STREE Isochorismatase family p rotein yecD OS=Streptococcus pneumoniae OX=1313 GN=entB _1 PE=4 SV=1

SEQ ID NO: 92931 - protein, 86 aa, Streptococcus pyogenes
  misc_feature (1)..(86): tr|Q1J8F2|Q1J8F2_STRPF Isochorismatase OS=Streptococcus pyogenes serotype M4 (strain MGAS10750) OX=370554 GN=M GAS10750_Spy0259 PE=4 SV=1
MQLFKGEVIEKGIDNLVMIGMLTNYCMDMTVRVAFELGYEVSVIEHGSTTFDDEDIQASLLIDYHESLWDGNFARVEPLDVILNEE

SEQ ID NO: 92932 - protein, 167 aa, Streptococcus sanguinis
  misc_feature (1)..(167): tr|F3UCK1|F3UCK1_STRSA Isochorismatase OS=Streptococcus sanguinis SK1056 OX=888820 GN=HMPREF9393_1269 PE=4 SV= 1
MKTVLIIIDVQNILVETGFQSDKMMDKISFLQHQARSKGAEIIYIQHVENPEDNALEDWQLSPLLNRKSDEKVFQKKYNSIFKETGLKDYLEKEDIGRLVLCGMQTEYCVDASVKVGFEFDYKLIIPEGAFTTFDGEDASAEKINTFYQKIWDGRFADVLDYKNIFN

SEQ ID NO: 92933 - protein, 174 aa, Streptococcus sp.
  misc_feature (1)..(174): tr|A0A139NIH1|A0A139NIH1_9STRE Isochorismatase OS=Strep tococcus sp. DD12 OX=1777880 GN=STRDD12_00765 PE=4 SV=1
MTEALIVVDIQEGLIDLGPANKDTFLSKVKATIAAFEAAGKEVIYFRHTEPEGFLSEGDASWEVYHELTPRPEDNIFRKNFNSIYRGTGLKAYLDEKGIKSYTVVGMQAEFCIDTSLKVGFEYGFEQILVRDAVTTFDKDQLKAQAIIDFYQDHIWDKRFAEVLPVEEVVAALE

SEQ ID NO: 92934 - protein, 196 aa, Streptococcus thermophilus
  misc_feature (1)..(196): tr|A0A2X3V032|A0A2X3V032_STRTR Isochorismatase OS=Strep tococcus thermophilus OX=1308 GN=NCTC12958_00426 PE=4 S V=1
MQGLLMIDMQRAFDNSSWGERNNPQLEVNSQKLLNFFRERGWPVLHVQHVYTNTQSRFHESQGQDFKDGFQPYPSEPVFQKIVNSAFIRTNLESYLRDKRIDKLVIAGFTLPHCVSTTTRMAANLGFKTSLISDATASFALPNLDGHLIDPEVLHTINLVSLHDEFAQVMTIEEFMGDDNEELYAFCPSGVMPSAI

SEQ ID NO: 92935 - protein, 151 aa, Streptococcus vestibularis
  misc_feature (1)..(151): tr|A0A448AC92|A0A448AC92_STRVE Isochorismatase OS=Strep tococcus vestibularis OX=1343 GN=entB PE=4 SV=1
MKTAFIIIDVQNILVETGFETQKLLEKISYLQDQARKQQIEIIYIQHIETEEALTSEDWKLSPLLKRQSDEKVFQKRYNSIFKETGLKEYLDQQGIEKLVLCGMQTEYCVDTSVKVAFEHGYKLVVPEGTVTTFDGDDIPAETINDFYENI

SEQ ID NO: 92936 - protein, 170 aa, Streptococcus viridans
  misc_feature (1)..(170): tr|A0A380M4Y8|A0A380M4Y8_9STRE Isochorismatase OS=Strep tococcus viridans OX=78535 GN=rutB PE=4 SV=1
MKMALLVIDIQTALIEAKPYAVDNCLSVWQKAIATCREKNIEVIYVRHNDDERLTGSHGWEIYGVIAPEVGEKIFDKHYNSAFKETHLQTYLDSQAIERLIIIGMATNYCIDTTVKVAFEFGYDLAVVKNGTTTFAEREITAEQLIQHYENAWNGRFAQVADLEEILKED

SEQ ID NO: 92937 - protein, 217 aa, Streptomonospora sp.
  misc_feature (1)..(217): tr|A0A4V0ZK20|A0A4V0ZK20_9ACTN Putative isochorismatase OS=Streptomonospora sp. M2 OX=2498135 GN=phzD PE=4 SV= 1
MPGIPEIVSYPLPRESDLPDNTVPWSIDPDRAVLLVHDLQEFFLRPLPEQMRTPMVAAAAALGEAARVGGAPIAYTAQPGGMTARQRGLLRDFWGPGMRVSAQDRRIVPQVAPAEGDWLLTKWRYSAFHATDLLELMRRHGRDQLVLCGVYAHVGVLATAIESFSNDIETFLVADALADFSAEHHRMALHYAADRCAAVLTTDASTEALVGPVARTR

SEQ ID NO: 92938 - protein, 126 aa, Streptomyces acidiscabies
  misc_feature (1)..(126): tr|A0A117E6I9|A0A117E6I9_9ACTN Putative isochorismatase OS=Streptomyces acidiscabies OX=42234 GN=phzD PE=4 SV= 1
MTPQQRGLLKDFWGPGMRVDPVDREVVEPVAPRDGDWLLTKWRYSAFFNTDLLQRMRDAGRDQLVVCGIYAHVGVLATCVESYTHDIETFLVADAVADFGEGDHRMALEYAARCCAVVLPTKEVLG

SEQ ID NO: 92939 - protein, 89 aa, Streptomyces albidoflavus
  misc_feature (1)..(89): tr|A0A140G477|A0A140G477_9ACTN Isochorismatase OS=Strep tomyces albidoflavus OX=1886 GN=dhbB PE=4 SV=1
MPSALTLQQFRADLAEVLHQEPEEVDLEDSPVSAGLDSLRLVTLVERWEQHGIVVCFIDLAELPSFRHWWQLLAERHAEGREAGRRGDA

SEQ ID NO: 92940 - protein, 226 aa, Streptomyces chartreusis
  misc_feature (1)..(226): tr|A0A2N9BJJ9|A0A2N9BJJ9_STRCX Putative isochorismatase OS=Streptomyces chartreusis NRRL 3882 OX=1079985 GN=ph zD PE=4 SV=1
MPGIPPIEPYALPTRESLPANTAGWAPDADRAALLVHDMQRFFLAPLPADTLRRALTGNVARLRADCAARDVPVAYTAQPGGMTPEERGLLADFWGPGMSPEPEHREIADGLAPAPGDQIFTKWRYSAFHRSGLLEWLRATGRDQLIICGVYAHVGVLMTAVDAFSHGIQPFLVADATADFSEGHHRSALEYAAGRCAMVLTGSDVRASFEGSSGPVPATAPGAAQ

SEQ ID NO: 92941 - protein, 138 aa, Streptomyces formicae
  misc_feature (1)..(138): tr|A0A291Q7C3|A0A291Q7C3_9ACTN Isochorismatase OS=Strep tomyces formicae OX=1616117 GN=KY5_2603 PE=4 SV=1
MWVQHDDEGLVKGSDGWRIVPELTPEDAEPLVGKSYGDSFEDTTLEAVLSGLGVGRLVVVGAETDACVRSTLHGAFVRGYDAALVGDAHTTVDKTAWGAPPPDQVIAHTNLYWSRQSAPGRTAGTVTTKDVVFDPAGP

SEQ ID NO: 92942 - protein, 218 aa, Streptomyces fradiae
  misc_feature (1)..(218): tr|A0A1Y2NRU5|A0A1Y2NRU5_STRFR Putative isochorismatase OS=Streptomyces fradiae ATCC 10745 = DSM 40063 OX=1319 510 GN=phzD PE=4 SV=1
MAGIPPIEPYPLPSADDLPGGTAQWTADPDRAVLLVHDMQRYFLRPFPAPLREELVGNAALLRERAVATGMPVAYTAQPGGMTDEQRGLLKDFWGPGMRVDPADREVVEPLTPGPDDRVFTKWRYSAFFRSGLLEWMRGLGRDQLVVCGVYAHVGVLMTAVDAFTHDIRPFLVADAVGDFSAAYHRLAVEYAAQRCAVVTTTGTVLAQLGAAPAGAAA

SEQ ID NO: 92943 - protein, 207 aa, Streptomyces fulvissimus
  misc_feature (1)..(207): tr|N0CRH4|N0CRH4_9ACTN PHZA Probable isochorismatase OS =Streptomyces fulvissimus DSM 40593 OX=1303692 GN=SFUL_ 3324 PE=4 SV=1
MAGIAPIPPYPLPERGDLPDNTARWSIDPDRAVLLVHDMQRYFLQPFAPELRDPLLANAARLRDHAAAAGMPVAYTAQPGSMTPEGRGLLKDFWGPGMRAEPADREVVDELTPAPGSWMLTKWRYSAFFRTDLLERMRAAGRDQLVICGVYGHVGILATAIESFTQDIETFLIADAVGDFSLERHRMTMEYAAHRCAVVLTTKEAVG

SEQ ID NO: 92944 - protein, 225 aa, Streptomyces glaucescens
  misc_feature (1)..(225): tr|A0A089X6A7|A0A089X6A7_STRGA Putative isochorismatase OS=Streptomyces glaucescens OX=1907 GN=phzA PE=4 SV=1
MAGIPAIRPYPMPTREELPASDVAWTVDPDRAVLLVHDLQKYFLAAFPAGRQPVVDLVDNAARVRARCAELGVPVAYTAQPGGMSRQERGLLKDFWGPGMTPSPEHREVVDPVAPADGDWKLTKWRYSAFFKTDLLERMRATGRDQLILCGVYAHVGVLMTAVDAFTHDIQPFLVADAIADFSAEDHRMALEYAATRCAALTTTGELLTALAAPRVAVAAGRESA

SEQ ID NO: 92945 - protein, 85 aa, Streptomyces griseorubiginosus
  misc_feature (1)..(85): tr|A0A385ZLC7|A0A385ZLC7_9ACTN Isochorismatase OS=Strep tomyces griseorubiginosus OX=67304 GN=dhbB PE=4 SV=1
MPEPLTLDAFLADLAEFLHQQPDEVDLDENPLDAGLDSLRITTLAERWRSAGAEVSFVELAERTSFGEWWQLLSERQAGAAHADA

SEQ ID NO: 92946 - protein, 210 aa, Streptomyces griseus
  misc_feature (1)..(210): tr|A0A2X2PHR2|A0A2X2PHR2_STRGR Isochorismatase OS=Strep tomyces griseus OX=1911 GN=dhbB_2 PE=4 SV=1
MALPAIAPYPMPAAGELPANRVDWTVDPARAVLLVHDLQNHFLSAYDRRAAPVPELLAHVAELKKDAARLGVPVLYTAQPGGQSAEERGLQQDFWGPGLPADEHLAAIADEVAPGTGDTVLTKWKYSGFVRTDLLERLREQGRDQIVITGVYAHIGVLMTACDAWMQDIQAFVVADAVADFSAEDHAMALRWAAGKCAVVTTARTVFEGK

SEQ ID NO: 92947 - protein, 207 aa, Streptomyces hundungensis
  misc_feature (1)..(207): tr|A0A387HHG3|A0A387HHG3_9ACTN Putative isochorismatase OS=Streptomyces hundungensis OX=1077946 GN=phzD PE=4 S V=1
MTGIPPIAPYSLPPSHALPENSVRWTVHPDRAVLLIHDMQSYFLNPFEDGMRSTLVHTVADLKKRCAALGVPVAYTAQPGSMTDEERGLLKDFWGPGMRTDEAERAIVPELEPDPEDWLSTKWRYSAFFKSELLQRMRALQRDQLIVCGVYAHIGVLSTALDAFSNDVQPFLVADALGDFSAAHHRLTLAYAARSCAMVVRSEDVLA

SEQ ID NO: 92948 - protein, 100 aa, Streptomyces jeddahensis
  misc_feature (1)..(100): tr|A0A177HIV4|A0A177HIV4_9ACTN Isochorismatase OS=Strep tomyces jeddahensis OX=1716141 GN=dhbB PE=4 SV=1
MEATESTGRDGGKTPPAGADPLTRQLLRLMAARCAQQAGPIELAVHEDLVDHDLDSIATMELISAWHRRGIEVGFPELMARPTPGHCRSPLDRRGIANAA

SEQ ID NO: 92949 - protein, 210 aa, Streptomyces laurentii
  misc_feature (1)..(210): tr|A0A161JVI8|A0A161JVI8_STRLU Isochorismatase OS=Strep tomyces laurentii OX=39478 GN=SLA_0848 PE=4 SV=1
MTRPDRLTGQLDPDGAVLLTVECQEGVVGKTSALPELAAAARESGALDNIARLVAGAHRAGVQVMHAVAERRPDGRGANRNARLFRAAARLPVAQHTGSAAVQIAEPIEVTEADLVVRRLHGLSPLAGTDVDALLRNLGCRTLVVTGVSANVAVPNAVFDAVNLGYEVVVPSDAIAGVPADYTAALTRHTLALVATLTTTDEVLACWRAH

SEQ ID NO: 92950 - protein, 185 aa, Streptomyces malaysiensis
  misc_feature (1)..(185): tr|A0A291SZI6|A0A291SZI6_9ACTN Isochorismatase family p rotein OS=Streptomyces malaysiensis OX=92644 GN=DNK48_1 2565 PE=4 SV=1
MPATTLDPNTALVLVDLQKGITGLPTVHPTAEVVERAARLAAAFRKRGLPVVLVRVVAGAPGRTEAQGSGAGGRFPADFADLVPELGQEDGDVVVTKHTWGAFHGTDLDLQLRRRGVTQVVLGGVATSIGVESTARGAYAHGYHVTLATDAMTDMDAEAHHNSVEKIFPRLGETDSTDAIIGLLG

SEQ ID NO: 92951 - protein, 76 aa, Streptomyces netropsis
  misc_feature (1)..(76): tr|A0A445NJC8|A0A445NJC8_STRNE Isochorismatase OS=Strep tomyces netropsis OX=55404 GN=dhbB_1 PE=4 SV=1
MALTLDRIRADVADVLGEDPADIPDDENLVDYGLDSVRIMTLVERWRRDHGTEVTFVDLAEQPAIEQWAPLLGVRA

SEQ ID NO: 92952 - protein, 127 aa, Streptomyces olivochromogenes
  misc_feature (1)..(127): tr|A0A250VT76|A0A250VT76_STROL Hydrolase OS=Streptomyce s olivochromogenes OX=1963 GN=SO3561_08977 PE=4 SV=1
MTLCSFETSSGPLTPEITRTLPDTEIIDRLHINAWRNGTLRAAVEAIGRRPLLMAGLWTEVRLTFPALSATQAGYEVFAVVDASAGSSTAAHEAAIVRRCHGHRPRPHGRLGTGRQSCECGIQQQGA

SEQ ID NO: 92953 - protein, 218 aa, Streptomyces rubrolavendulae; identical to SEQ ID NO: 92942
  misc_feature (1)..(218): tr|A0A1D8GAP1|A0A1D8GAP1_9ACTN Putative isochorismatase OS=Streptomyces rubrolavendulae OX=285473 GN=phzD PE=4 SV=1

SEQ ID NO: 92954 - protein, 225 aa, Streptomyces scabiei
  misc_feature (1)..(225): tr|A0A117EDA5|A0A117EDA5_STRSC Putative isochorismatase OS=Streptomyces scabiei OX=1930 GN=phzD PE=4 SV=1
MGIPAIAAYPMPTEDELPQNTARWTVDPRRAVLLIHDMQKYFVEPFPADRPPVTELVRNVTALRERCAALGVPVAYTTQPGGMTEEQRGLLRDFWGPGMTVAREHREVVDAIRPAAGDLVLTKWRYSAFHRTRLLASMRAWKRDQLIVCGVYAHVGILMTGADAFASDIQAFLVADAVADFTPEHHRFALRYAAERCAMTPTTAAVLDRLAPAEADGRPRKEGAP

SEQ ID NO: 92955 - protein, 210 aa, Streptomyces sp.
  misc_feature (1)..(210): tr|G2NN37|G2NN37_STREK Isochorismatase OS=Streptomyces sp. (strain SirexAA-E / ActE) OX=862751 GN=SACTE_6072 P E=4 SV=1
MALPAIAPYALPTGAELPANRVDWAVDPARAVLLVHDLQNHFLGAYPAGEQPLTGMLDNTARIIGQCRRAGVPVVYSAQKGGQTPEERGLQLDFWGPGAADDPTALAVPPAVAPADGDIVLTKWKYSAFVRTRLEDVLRESGRDQLVVTGVYAHIGVLMSAADAWMRDIQAFVVADAVADFSREDHDMALRYAAGRCARVVTTDTLLDEI

SEQ ID NO: 92956 - protein, 219 aa, Streptomyces thermoautotrophicus
  misc_feature (1)..(219): tr|A0A132MUD3|A0A132MUD3_9ACTN Isochorismatase OS=Strep tomyces thermoautotrophicus OX=1469144 GN=LI90_2489 PE= 4 SV=1
MGIPAIRPYPMPTERELPENQVSWRPDPDRAALLIHDMQRYFVDFFPAGQSPRNELLANIQLIRRTAAELDMPVVYTAQPGAMTREQRGLLHDFWGPGMSDDPGHKRIVDELAPAEGDIVLTKWRYSAFHRSDLADIIRGQGRDQLIVCGVYAHVGCLMTACDAFALDIQPFLVADAVADFTPEYHRMALAYAAERCAATIFTRTLVGLLSRSGLQPVS

SEQ ID NO: 92957 - protein, 200 aa, Streptomyces venezuelae
  misc_feature (1)..(200): tr|F2R923|F2R923_STRVP Isochorismatase OS=Streptomyces venezuelae (strain ATCC 10712 / CBS 650.69 / DSM 40230 / JCM 4526 / NBRC 13096 / PD 04745) OX=953739 GN=SVEN_3 197 PE=4 SV=1
MSMEIAQNAALVVIDVQKGFEEEYWGKRNNPAAEENIAALIDLWQETGRPVVFVRHDSPAGSRSPLRAGYAGNAFKDFVEERRGKGAGPELLVTKSVNSAFYGEPSLDGWLTGQDIAQIVIVGIQTNMCNETTARMAGNLGYEVLFPLDAMHTFDLEGPFGWSRSADELAQATAVSLHGGRFAEVVSTADVVAGVSAGVR

SEQ ID NO: 92958 - protein, 205 aa, Sulfolobus islandicus
  misc_feature (1)..(205): tr|C3MKD0|C3MKD0_SULIL Isochorismatase hydrolase OS=Sul folobus islandicus (strain L.S.2.15 / Lassen #1) OX=429 572 GN=LS215_0275 PE=4 SV=1
MRAVNLIMKIEVPSIPEHKEVILDPTNTALIIVDMQNDFVRKNGKLSVPTAEATIPFIKRLVDKARSSNALVIYTQDWHMKDDPEFKIWGEHALAGTWGAEIIDELTPEKSDFIVKKYRYDAFFESSLDYILRVKNIKNTIITGTVANICVLHTAGSAALRWYNVIMPKDSISAITEFDYYATLRQVDFLYKGIITTADGIKFER

SEQ ID NO: 92959 - protein, 182 aa, Sulfurospirillum halorespirans
  misc_feature (1)..(182): tr|A0A1D7TIM5|A0A1D7TIM5_9PROT Isochorismatase family p rotein OS=Sulfurospirillum halorespirans DSM 13726 OX=1 193502 GN=SHALO_1092 PE=4 SV=1
MRIFAQQTAMLLVDVQERLFGHIEGHDELEKHLLVLLQGLQSLDIPIVCNQQYTKGLGETIQSIRLLLGDVEIYEKRTFSCCQNPDVMEALKALHVKRVIVAGVESHVCILQSVLDLLDAGFEVIVCADALGSRKAKDHELALLRMTQEGARVGSVESLLFELLRSADHAQFKTISNLVKAL

SEQ ID NO: 92960 - protein, 182 aa, Sulfurospirillum sp.
  misc_feature (1)..(182): tr|A0A290HTT3|A0A290HTT3_9PROT Isochorismatase family p rotein OS=Sulfurospirillum sp. JPD-1 OX=220622 GN=SJPD1 _1124 PE=4 SV=1
MRLDSKQTAMLLVDVQERLFVHIHNHEQIEKHLLVLLQGLKTLEIPILCNQQYTKGLGQTISSVHSLLGKMTIYEKCTFSCYQNSEVTEALEALHVKCMIVAGVESHVCVLQSVCDLLDAGFEVIVCADAMGSRKEYDHNIALRRMEQEGASLATTESLLFELLQSAHHPQFKEISALVKTL

SEQ ID NO: 92961 - protein, 188 aa, Sulfurovum sp.
  misc_feature (1)..(188): tr|A6Q8S6|A6Q8S6_SULNB Isochorismatase hydrolase OS=Sul furovum sp. (strain NBC37-1) OX=387093 GN=SUN_0927 PE=4 SV=1
MTKTALIIVDMQNDFVLPNAPHCIEGAVPIIPNIQKVLYTFREKLLPVFHVYREYRADGSDIEKTRLDDFLGGTKYCVPRTKGCEIIDGLSPMDGEYRIVKNRFSGFMNTELDFILRRLKIERIVVCGIQYPNCIRATIYDGIALGYDVTLVTDATAAQTEEIAQANIMDIRNIGVECISTELLIEQA

SEQ ID NO: 92962 - protein, 185 aa, Synergistetes bacterium
  misc_feature (1)..(185): tr|A0A1V6A3C0|A0A1V6A3C0_9BACT Putative isochorismatase OS=Synergistetes bacterium ADurb.Bin155 OX=1852914 GN= phzD PE=4 SV=1
MLPFRIEPERAQLLLIDLQDKMLQAVFDREKTIRNAGILIEAARTMGVPIKFTEHYPKGLGKTIPPIMEKIPPVVLPFEKIHFSCCDEMGFDEYLRDDRRDQIIISGVVSHICVLATVMDLLSQGYPVAVAADACSSRDPDHHRMACEAITAAGALVAPVETLAYQLIRRAGTEQFKTMLPFFKA

SEQ ID NO: 92963 - protein, 188 aa, Syntrophaceae bacterium
  misc_feature (1)..(188): tr|A0A1V4X383|A0A1V4X383_9DELT Putative isochorismatase OS=Syntrophaceae bacterium PtaB.Bin038 OX=1811716 GN=p hzD PE=4 SV=1
MKPAVVIVDMLRDTLEGAHPMPIKELGREIVPAINRLTAFARGRSIPVIFSMDSFLPGDFIFQGRMKNHSIRGTKGAEVTDLLTQAGTDIYLPKRRFSAFYKTDLDQTLRLYGADTVALCGIATHWCVLSSAFDALSNDFRAVILEDCCASFSREMHASCLEIYRKNPLYPLLRVMTLDAFLAEVPEA

SEQ ID NO: 92964 - protein, 233 aa, Syntrophorhabdus sp.
  misc_feature (1)..(233): tr|A0A1V4WCA5|A0A1V4WCA5_9DELT Isochorismatase OS=Syntr ophorhabdus sp. PtaB.Bin027 OX=1811699 GN=entB PE=4 SV= 1
MKEQRSQQIRDEGNKEKHEITCRGKSNNITGNNDSKRGRTVKPAIIVVDMLLDNLGLERKGKGEEEKIIKPVAAFLKECRQLSVPVIFACDSFLKDDFIFQGRMKPHAIRGTDGTKPLPDLEPQPSDIILEKRRFSAFFKTDLDQTLRTMHVDTVAVGGINTHFCVLATAFDAVCHDFTTIILEDLSAAYKREIHQSFIDTYRYSAIYPILRVMKSKEFLSEYRDLRDLGIGD

SEQ ID NO: 92965 - protein, 179 aa, Syntrophus sp.
  misc_feature (1)..(179): tr|A0A1V4XF22|A0A1V4XF22_9DELT Vibriobactin-specific is ochorismatase OS=Syntrophus sp. PtaB.Bin001 OX=1811710 GN=vibB PE=4 SV=1
MLTAENTILAVIDFQGNLAQAMADRNSLFDNAKKIIRGMKVLEIPLIVTEQIPAKLGPTIPEIAVLLEGVLPIAKESFSCCQNEFFMDTLKATGRKSILVAGIETHICVYQTALDLLAAGYEVHIISDAVSSRTAQNREIGLHLIRNAGGALTCTEAVLFELLRTAAHEKFKDIANIVK

SEQ ID NO: 92966 - protein, 284 aa, Tatumella ptyseos
  misc_feature (1)..(284): tr|A0A085JQA3|A0A085JQA3_9GAMM Isochorismatase OS=Tatum ella ptyseos ATCC 33301 OX=1005995 GN=entB PE=4 SV=1
MSIPKPESYRLPTADELPDNKVKWAFEPGRAALLIHDMQNYFLRFWEEDSALVREVIGNIARLRTQCKALGIPVFYTAQPAEQSEKDRALLNDMWGPGLNRHPEQQRVVDGLTPEADDIVLTKWRYSAFQRSPLEQQLHDMGRDQLIITGVYAHIGCLTTATDAFMRDIKPFMVADALADFTREEHMMALKYTAGRCGKVVRCEDLLILPESKAALRMLVLPLLEDDDIPEDDENLIDYGLDSVRMMALAGRWRQAVPAIDFVALAKNASIDGWWALLSQGKTQ

SEQ ID NO: 92967 - protein, 292 aa, Teredinibacter turnerae
  misc_feature (1)..(292): tr|C5BUB8|C5BUB8_TERTT Isochorismatase OS=Teredinibacte r turnerae (strain ATCC 39867 / T7901) OX=377629 GN=dhb B PE=4 SV=1
MSIPQINSYPLPAASQLPTNRVNWPLDTSRAAVLVHDMQNYFARYYGDNNPLLEKVIENIALILNWARAQGLPIIYTAQPSEQPPAQRALLNDMWGPGLTDATPELQNIIPALAPQPGDTTLVKWRYSAFQRTHLQDLLQEGKRDQLIIVGIYAHIGCLTTALDAFMRDIKPFFIADAVADFTEDDHRMSLDYVAGRCGQVMSCGQVISTGTSDNPSLTRESLQQQLLTLIDETELDFDPDENLVDYGLDSVQVMQLIGEWKKHGLDFHFEELARQPTFNSWWQLIESKRAA

SEQ ID NO: 92968 - protein, 172 aa, Tetrasphaera australiensis
  misc_feature (1)..(172): tr|W6JZD1|W6JZD1_9MICO Isochorismatase hydrolase OS=Tet rasphaera australiensis Ben110 OX=1193182 GN=dhbB PE=4 SV=1
MSRNVSVRSDIALVAIDLMERVVMAPARPHSGLDVVTRTIVLAEALRAKGGHVVWVRSERPTPTQPPGSDLVPLARPQPEDLIVVKRTWGAFTATGLHERLQARGVTTLWLTGIATSNGVESTGRAADELGYRLVFVEDAMTAPVEGEHEHSVSVIFPRLGNVVRHSQLIGD

SEQ ID NO: 92969 - protein, 299 aa, Tetrasphaera japonica
  misc_feature (1)..(299): tr|A0A077LV68|A0A077LV68_9MICO Isochorismatase (Modular protein) OS=Tetrasphaera japonica T1-X7 OX=1194083 GN= BN12_1370005 PE=4 SV=1
MPLPHLIDYPAPLTDLPESQATWSLEPERAAVLVHDLQRYFLRPFAPGSPVVEAMLTHTAAILRAARSAGIPVLYTAQDGDQDPAERGLQGDLWGRGMRADPEHTAIVDEVAPTGSDTVLPKHRYSAFARSDLADRLGRAGRGQLVITGVYAHIGILATVFDAFQREVQPFVVADAVADFGAAEHRRALCQVASCCGVVTTTDDVLARFGRPADVDGVDETDPWDARIRAALGGLLAGDAIEELFARPDADAFELGLDSLRAFEFLDLLADEGLDVDFGEFTRTPTLDWLRRQARSVGV

SEQ ID NO: 92970 - protein, 181 aa, Thauera aromatica
  misc_feature (1)..(181): tr|A0A2R4BLW3|A0A2R4BLW3_THAAR Isochorismatase OS=Thaue ra aromatica K172 OX=44139 GN=Tharo_1324 PE=4 SV=1
MMLMNRDKSVLLVIDVQARLAPHIHDREQVVANCIWLARVAERAGVPVVVTEHFPEKLGATVDELRAATGNARYVGKRCFSAQAEGGLADTAVERCRQVIVCGTEAHVCVMQSALELRWAGKEVFVVAEASGSRAAADRDLAFARMREHGVEIVSREMVAFEWLQRGGTELFREINRDFIR

SEQ ID NO: 92971 - protein, 181 aa, Thauera chlorobenzoica
  misc_feature (1)..(181): tr|A0A1H5S1Y1|A0A1H5S1Y1_9RHOO Isochorismatase OS=Thaue ra chlorobenzoica OX=96773 GN=Tchl_2165 PE=4 SV=1
MMLMNRDKSVLLIIDVQTRLAPHIHDHRQVLANCIWLAQVAERAGVPVVVTEHFPEKLGATVDEVRAVTASARYVGKRCFSAQAEGGLADTAVEARRQVIVCGTEAHVCVLQTALELRWAGKEVFVAAEASGSRDPAARDLAFTRMRGHGIEIVSREMVAFEWLQRGGTELFRQINRDFIR

SEQ ID NO: 92972 - protein, 221 aa, Thermobifida fusca
  misc_feature (1)..(221): tr|Q47NR6|Q47NR6_THEFY Isochorismatase OS=Thermobifida fusca (strain YX) OX=269800 GN=Tfu_1870 PE=4 SV=1
MSLPAITPYPLPTVDQLPANRAEWQITPARAVLLVHDMQRYFLRPYAESADPLRGVLTNISTLADTCRTLGIPVIYTVKPGGMDPAQRGLELHFWGRGMSATDEHTAIDTRIAPRPTDLVVVKARYSAFVGTDLAARLADLNRDQIIVTGVYAHIGCLLTAADAFMRDIQPFLVADATADFSAEEHRFALTYAATRCAMVTSTADALAALRSARVDVETGG

SEQ ID NO: 92973 - protein, 201 aa, Thermogutta terrifontis
  misc_feature (1)..(201): tr|A0A286RJV2|A0A286RJV2_9PLAN Isochorismatase OS=Therm ogutta terrifontis OX=1331910 GN=THTE_3636 PE=4 SV=1
MSEPTRIPPRSPELMSPQDTGLLVIDVQEKLVPHIHDHQKVVWNIRRLLDAARILGIRILATEQYPKGLGPTVSPLRERLGPIPEKLMFSCRECWSLFEEAEQAGLSRLLVCGIETHVCVQQTVLDFLASGWRVYVAADAVGSRHRIDYEIALRRMELAGAVITTTEAALFEWCIRAGTAEFKQISQLAREFPPGESAAVS

SEQ ID NO: 92974 - protein, 189 aa, Thermomicrobium roseum
  misc_feature (1)..(189): tr|B9L582|B9L582_THERP Isochorismatase (2,3 dihydro-2,3 dihydroxybenzoatesynthase) (Superoxide-inducible prote in 1) (SOI1) OS=Thermomicrobium roseum (strain ATCC 275 02 / DSM 5159 / P-2) OX=309801 GN=trd_A0009 PE=4
MKAAVLVIDMLNDFVTGKLGNERVRSVIDPLQHLLERARASGVPVVYIGDAHLPSDPEMAVWGPHAMKGTKEAETIPELAPQPGDTVLEKRTYSAFYETGLDLLLRSLGVDTVVITGLHTNICCRHTAADAFTHGYKIIVPEDCVNAFTEEEHREGIAYLRRVYGARITTSEELAREWEREPQTAATKA

SEQ ID NO: 92975 - protein, 204 aa, Thermoproteus tenax
  misc_feature (1)..(204): tr|G4RKK2|G4RKK2_THETK Isochorismatase OS=Thermoproteus tenax (strain ATCC 35583 / DSM 2078 / JCM 9277 / NBRC 100435 / Kra 1) OX=768679 GN=entB PE=4 SV=1
MLPEVVKVPHIPIMDKVSFPSRSTAVLVVDMQNDFAHPNGKLYSPSSGEIIPRIARLLERARSSGVRIIYTQDTHPPDDPVEFPIWGPHVVKGSWGWQIVDQLKPTEGDIVVEKMRYDPFFGTPLDHILRMYGISNLVVVGTVANICVLHAVAGARLRLYNVAVPIDGIAALNDFDYVAALRQMDYLYKAVLTTIDGVVFEEKT

SEQ ID NO: 92976 - protein, 183 aa, Thermosulfurimonas dismutans
  misc_feature (1)..(183): tr|A0A179D6E9|A0A179D6E9_9BACT Isochorismatase OS=Therm osulfurimonas dismutans OX=999894 GN=TDIS_0203 PE=4 SV= 1
MFIKPQDSFLMVIDPQERLLNAIYQPERVVKNIILLIKASQEFGVPVVPTTQYRKGLGDYLPEIKDALGEIEPLDKIEFSAFKNQVIAEEVQRLSRQTVILCGVETHICVYQTALSALEKGFRVVVVGDATSSRSPENISYGLSRMRELGVAVVSTEMLIYEWLEKAGTPAFKALLPYFKNKN

SEQ ID NO: 92977 - protein, 229 aa, Thiomonas sp.
  misc_feature (1)..(229): tr|A0A078BID9|A0A078BID9_9BURK Putative Isochorismatase hydrolase OS=Thiomonas sp. CB2 OX=554131 GN=THICB2_370 005 PE=4 SV=1
MSASETTLMTLRVRARPGPFACDLRNTALVLIDMQRDFIEPGGFGETLGNDVGQLAQAVEPAARLLAWARTYGLLVVHTRESHAPDLSDCPPAKRCRGEPSLRIGDMGPMGRVLVRGEPGNAIIDALQPIAGEVELDKPGKGAFYDTGLQEILQRRAITHLIFGGVTTEVCVQTSMREANDRGYDCLLVEEATASYFPYFKQATLEMIAAQGGIVGWTCKLDAVLRGVS

SEQ ID NO: 92978 - protein, 177 aa, Trabulsiella guamensis
  misc_feature (1)..(177): tr|A0A085AE33|A0A085AE33_9ENTR Isochorismatase OS=Trabu lsiella guamensis ATCC 49490 OX=1005994 GN=GTGU_01395 P E=4 SV=1
MVEKRAVMVVDMQNGVFATPRLQPERCVAQINRLTRVADTVIFIQHAQAGGLEEGSEGFALLPDLWQPDNALYITKTACDAFYRTTLADELAAHDIHAFVVCGCATDYCVDTTIRNGASRGYAITVAEDAHTTANRPAAPAETLIAHHNDVWRDLIVPDNPVYVKPVETILQEWLTN

SEQ ID NO: 92979 - protein, 260 aa, Tsukamurella paurometabola
  misc_feature (1)..(260): tr|D5UPZ9|D5UPZ9_TSUPD Isochorismatase OS=Tsukamurella paurometabola (strain ATCC 8368 / DSM 20162 / JCM 10117 / NBRC 16120 / NCTC 13040) OX=521096 GN=Tpau_0113 PE=4 SV=1
MENPASEVPSVTESHPQEAVSTAEVLGRRRLFQAAAWGTVGAVAVGGARAGTADAAVALPGSVSYRIGEIPIPRNKVAWQLDPRRAVLLVHDVQRYFMRIFDERTRGELLGNVARGQDWARRSGVPVIYSAQRGGATREQRGLIYDFSGAGMTADESDRGIEPAVAPRPGERVLTKHKLSEYFRSDLLQYLRDQGRDQLVLAGVYANTGVLLTAADSIQNDIQAFVIGDAVADQTPEGHRGGLAWVAARAGRVISAAELR

SEQ ID NO: 92980 - protein, 176 aa, Unknown
  misc_feature (1)..(176): tr|V4J5N2|V4J5N2_9CREN Amidases related to nicotinamida se OS=uncultured Acidilobus sp. CIS OX=1410574 GN=CISAc id_17510 PE=4 SV=1
MRPALVIIDMLNDFVHGALKTPEAASTVEPARRVLEHFRSRGWPVIYVNDSHYSTDIEMPLWGPHAMKGTWGAQVVPELAPREGEYVLEKHAYSGFYGTPLDHILRSLGVDTVVLVGLDADICVRHTAADAFFRGYRVVVVRDAVAARIDKNWEEYYRRVYGATIVSSDELPKVLG

SEQ ID NO: 92981 - protein, 182 aa, Unknown
  misc_feature (1)..(182): tr|A0A212JH90|A0A212JH90_9PROT Isochorismatase hydrolas e OS=uncultured Alphaproteobacteria bacterium OX=91750 GN=KL86APRO_11056 PE=4 SV=1
MRLSASRSCLVVIDVQERLAPVMGDPRKVIDGAARLAAAARRLGVPTLISEQYPKGLGPTMIDVREVVAEADAYVPKLDFSCCGEPAFMAKFEAFDRRQVAICGIEMHVCVMQTALDLKDKGYDVFVVADACGSRNAADEEIAKLRFAAAGIPLVSIEMVIFEWLERSGTPEFKEISKTLIR

SEQ ID NO: 92982 - protein, 179 aa, Unknown; identical to SEQ ID NO: 92680
  misc_feature (1)..(179): tr|Q5NW14|Q5NW14_9ARCH Isochorismatase OS=uncultured ar chaeon OX=115547 GN=orf27 PE=4 SV=1

SEQ ID NO: 92983 - protein, 77 aa, Unknown
  misc_feature (1)..(77): tr|S5UCC8|S5UCC8_9BACT Isochorismatase [enterobactin] s iderophore OS=uncultured bacterium esnapd10 OX=1366590 PE=4 SV=1
MSEIPGTKEELRALIAEKLEIDPGEIADDDDLIEWGLNSVTTMGLAGRWRRAGLDVDAKTLVRNVTVNGWWALLAAA

SEQ ID NO: 92984 - protein, 285 aa, Unknown
  misc_feature (1)..(285): tr|A0A212I5X8|A0A212I5X8_9ENTR Isochorismatase OS=uncul tured Citrobacter sp. OX=200446 GN=entB PE=4 SV=1
MAIPKLQAYALPTALDIPVNKVDWAFDPERAALLIHDMQDYFIGFWGDNCPMMEQVVANIAALRQYCKEHNIPVYYTAQPKEQSDEDRALLNDMWGPGLTRSPEQQKIVEALAPDEADTILVKWRYSAFHRSPLEQMLKETGRNQLIITGVYAHIGCMTTATDAFMRDIKPFMVADALADFSRDEHLMSLKYVAGRSGRVVMTQELLPTPVPASKDALRSVILPLLDESEEPMDDENLIDYGLDSVRMMALAARWRKVHGDIDFVMLAKKPTIDAWWALLSREVK

SEQ ID NO: 92985 - protein, 193 aa, Unknown
  misc_feature (1)..(193): tr|A0A1C5MAC6|A0A1C5MAC6_9CLOT Isochorismatase OS=uncul tured Clostridium sp. OX=59620 GN=dhbB PE=4 SV=1
MDQTAKTIQDLLLVIDMQNVYTKDQEWACEGIEKASASILRLLNSRALSQVIFTQYLATKHPEGVWKEYNKVNAAVNADPWLNEMMSEFLPYTKKYPVYTKSVYSSFVIPQVRELAKHASRIVISGVVAECCVLSTALSAIDAGCKVIYLTDAVAGLNAVSQKEAENILSYLSPLHTKLMTTQQYLDSLLQEE

SEQ ID NO: 92986 - protein, 125 aa, Unknown
  misc_feature (1)..(125): tr|A0A483A4S5|A0A483A4S5_9GAMM Isochorismatase OS=uncul tured SUP05 cluster bacterium OX=655186 GN=CRYPD_456 PE =4 SV=1
MNKNDNTVILEAINIASTKWKNAFNSGDATGCAAQYEEKAIMNAKPFGAYTGAVEIQAFWQKLIDGGFSDIDYINPEIKVIDENSAILTSNWKMNKAHGMITKELWVLQSDGTAKLREDDFEAQD

SEQ ID NO: 92987 - protein, 215 aa, Variovorax sp.
  misc_feature (1)..(215): tr|A0A109BKV3|A0A109BKV3_9BURK Isochorismatase OS=Vario vorax sp. WDL1 OX=207745 GN=APY03_6685 PE=4 SV=1
MLPEDPAWAGRNQHPDSQRSSRMNSSPLKEGLHIMNKRATIVVDLQNEYLPDGKLPLVGLDAALANAARVIAAARAHGELLIHVRHESAQPDAPVFTPGTIGVQIIPAVAAEAGEPVIVKNHPNSFRGTQLKELLDAQGVKELVVIGAMSHMCIEATSRAAADFGYPVTVAHDACATMNLEFDGTAVPAAQVHAASMAALSFGYASITSTDKHLA

SEQ ID NO: 92988 - protein, 173 aa, Veillonella parvula
  misc_feature (1)..(173): tr|T0TA67|T0TA67_9FIRM Isochorismatase OS=Veillonella p arvula HSIVP1 OX=1316254 GN=HSIVP1_892 PE=4 SV=1
MAQALIVIDIQEGLVKESPYDAKNLIANTKAIIQHFRDQNIEVIFIRHSEDEGLLATGSDNWQVYHELNPQENEKIFNKYYNSIFKDSELKEYLDSKSITDLTFVGMQVEFCIDTSVKVGFEYGYKITIVEDAISTFDNDHLSADTILSFYKEKIWRNRFAQLKTTNEMLSIN

SEQ ID NO: 92989 - protein, 185 aa, Verrucomicrobia bacterium
  misc_feature (1)..(185): tr|A0A1V6JX34|A0A1V6JX34_9BACT Putative isochorismatase OS=Verrucomicrobia bacterium ADurb.Bin006 OX=1852924 G N=phzD PE=4 SV=1
MSQTSWRLDRTATGVLVVDIQERLLPAIFERDRVVSETLCLIRGASVLGVPLFATEQYRKGLGPTVPEVAEAIPGFAPFEKLAFSACGAPGLIDAMRARAIKDVIVCGIEAHVCVCQTALDLLEHGFRPFVIADAVSSRTPENRRLGLDRMRQAGAVIASNEMALFELLDKAGTDDFKAILSLVR

SEQ ID NO: 92990 - protein, 190 aa, Verticillium dahliae
  misc_feature (1)..(190): sp|G2X4M1|ISC1_VERDV Secreted isochorismatase effector Isc1 OS=Verticillium dahliae (strain VdLs.17 / ATCC MYA -4575 / FGSC 10137) OX=498257 GN=Isc1 PE=1 SV=1
MSSFRSMLGVPPSTASTQDSVLVIIDAQGEYAEGKLKISNIEASRPNISSLLEKYRAANAPIVHVVHETPAGAPLFTQGTKLAEIFDELTPKEGEAVVTKHHPGSFADTNLQEILEKSGKKKIVLVGYMAHVCVSTTARQGAQRGWDVIVAEDAVGDRDIPGVDAAQLVKVALAEIADVFGTLVSSKDIN

SEQ ID NO: 92991 - protein, 300 aa, Vibrio aerogenes
  misc_feature (1)..(300): tr|A0A1M5VUV8|A0A1M5VUV8_9VIBR Vibriobactin-specific is ochorismatase OS=Vibrio aerogenes CECT 7868 OX=1216006 GN=vibB PE=4 SV=1
MSIPKIASYELPDSEHFPQNKVNWQVEPQNAVLLIHDMQCYFMNFFDTDAAPVPKLKQNIQSLAKAAREAGIPVIYTAQPVNQDPEERALLTDFWGQGLTCDAEIISELTPEQNDICLTKWRYSAFRKNELHEYMRSHGRNQIIICGVYGHIGILSTTLEAFMLDIKPFVVGDAIADFSAEEHEWTMKYVTGRAGAVKSLQTVLDEISVRPDAIVPAGLTLDRMKHDIAQVLEISIDELDETENLLFYGLDSVRAMTLLEKWQQQGTTITFAQLMEKVTLQEWWQLIEDQAAMTPAGCAA

SEQ ID NO: 92992 - protein, 307 aa, Vibrio anguillarum
  misc_feature (1)..(307): tr|A0A378MRF3|A0A378MRF3_VIBAN Isochorismatase OS=Vibri o anguillarum OX=55601 GN=dhbB PE=4 SV=1
MAIPKIASYSIPLAETFPKNKVHWHVQADRAVLLIHDMQKYFINFFDHSQAPVPELLANISELKSLARQANIPVVYTAQPPNQDPVERALLTDFWGTGLTKDTEIVSELSPEDGDIQYTKWRYSAFKKTPLLEWMKETQRDQLIIVGVYAHIGILSTALDAFMLDIQPFVVGDAVADFSLEDHHHTLKYITERVGCVTSLEALKPQMIHSQETRLLSLEQMRQQVAELLDLDLDEVDVDEKLTFLGLDSIRAVTLFESWRKMGIECAFSEMIKYSTLREWWHVMEPSVVAQSSHQVTDTRSTEEQPV

SEQ ID NO: 92993 - protein, 288 aa, Vibrio campbellii
  misc_feature (1)..(288): tr|A0A1Q1PAA3|A0A1Q1PAA3_9VIBR Vibriobactin-specific is ochorismatase OS=Vibrio campbellii OX=680 GN=vibB PE=4 SV=1
MAIPKIASYKIPQSETFPENTVDWKTDPKKAVVLVHDLQTYFLNFFDKTKSPVPELLENVRQVLDNARAANIPVIYTAQPANQEPNERALLTDFWGAGLTQDTDIAPEVSPQAGDIQYTKWRYSAFKKTPLLQWMQEEQRDQLIIVGVYGHIGILSTALDAFMLDIKPFVIGDAIADFSEEDHLHTLKYVAGRSGCVKSVNEFIKTMKPSDSSSALSLESMRKDVADILDVDLDEVDVDENLIFLGLDSIRVMTLHSRWKALGFNVELAEMVALHTIKDWWEATQVTA

SEQ ID NO: 92994 - protein, 293 aa, Vibrio cholerae
  misc_feature (1)..(293): tr|A0A0H3PWA1|A0A0H3PWA1_VIBCL Isochorismatase of sider ophore biosynthesis OS=Vibrio cholerae B33 OX=417400 GN =VCE_002120 PE=4 SV=1
MAIPKIASYPLPVSLPTNKVDWRIDASRAVLLIHDMQEYFVHYFDSQAEPIPSLIKHIQQLKAHAKQAGIPVVYTAQPANQDPAERALLSDFWGPGLSEETAIIAPLAPESGDVQLTKWRYSAFKKSPLLDWLRETGRDQLIITGVYAHIGILSTALDAFMFDIQPFVIGDGVADFSLSDHEFSLRYISGRTGAVKSTQQACLEIAAQHSKLTGLSLRTMQHDVAAALNLSVDEVDVQENLLFLGLDSIRAIQLLEKWKAQGADISFAQLMEHVTLQQWWQTIQANLHQPCSA

SEQ ID NO: 92995 - protein, 295 aa, Vibrio fluvialis
  misc_feature (1)..(295): tr|A0A1L9L0H2|A0A1L9L0H2_VIBFL Vibriobactin-specific is ochorismatase OS=Vibrio fluvialis OX=676 GN=vibB PE=4 S V=1
MGIPKIAGYPLPTPAEFPDNRTGWTIDPDQAVLLIHDMQEYFVNYYQPDSSPVVDIIQHIQRLKAAAKKAGIPVIYTAQPANQHPTDRALLTDFWGPGLNGDHVPIVEALSPEEGDIEYVKWRYSAFKKTPLLEFMRAQGKSQLIISGIYGHIGILSTTLDAFMLDVQPFVIGDAIADFTREDHLRTLQYVASRSGSVKRLDEALDEIRSQKPLTLEQIQQDVATSLGIQPDEVDLDEDLMFVGLDSMRAMVLVEKWHQQGENISFGQLMEAASLREWWLVIEQARNEEQTMAVA

SEQ ID NO: 92996 - protein, 296 aa, Vibrio harveyi
  misc_feature (1)..(296): tr|A0A454CNW3|A0A454CNW3_VIBHA Isochorismatase OS=Vibri o harveyi OX=669 GN=dhbB PE=4 SV=1
MAIPSISGYSLTKVKPENRVNWSVEPHRAVLLIHDMQQYFLNFYDADSELIQTLTRNIQEIKQACIDAGIPVVYTAQPGDQRQEDRALLTDFWGPGLKADDNITRISPALAPTEQDTVYTKWRYSAFQRTPLKSMMDETGRDQLIIVGIYAHIGCLQTAAEAFMTDIKAFMVSDAVADFSASDHDMALNYVAGRCGYVLDKQQLLEQVASANELAAGDFVIPQSQPQLTQQLAALLEVAADEMTPEDSLLDFGLDSVRMMSLVGDWQQAGLDVSFMELAAKPSLQDWWRLIEKKLT

SEQ ID NO: 92997 - protein, 183 aa, Vibrio ishigakensis
  misc_feature (1)..(183): tr|A0A0B8QK62|A0A0B8QK62_9VIBR Isochorismatase OS=Vibri o ishigakensis OX=1481914 GN=JCM19241_6058 PE=4 SV=1
MVENNTVANMELLMNTAVAEGFPLVISPHYYFPTDHKWKFEGTLEKLMHAINMFDRKSALDVEGFEGSGADWMEQFKPAINDENTVICGAHKVYGPENNDLILQLQKLRIEKVILAGMSANLCVESHLRELVERGFEVAVVADATAAAKVPGLDGMLSALTNYRMIASDIFTAKEIVEKMKAK

SEQ ID NO: 92998 - protein, 107 aa, Vibrio kanaloae
  misc_feature (1)..(107): tr|A0A0H3ZIG4|A0A0H3ZIG4_9VIBR Isochorismatase OS=Vibri o kanaloae OX=170673 PE=4 SV=1
MAIPKIASYQVLPLESFPTNKVDWVIDPKKSVVLVHDLQAYFLNFFDKALSPVPELLRNVNKVTESARSAGIPVVYTAQPANQDPNERALLTDFLGGWTDTRYRDST

SEQ ID NO: 92999 - protein, 302 aa, Vibrio mangrovi
  misc_feature (1)..(302): tr|A0A1Y6IWS5|A0A1Y6IWS5_9VIBR Isochorismatase OS=Vibri o mangrovi OX=474394 GN=entB PE=4 SV=1
MTIARLTDYSLPQLSELPLGKVDWKLDNSRAALLIHDMQDYFVNFWPQDSQLITQVIHNLVTIRTYCRANGIPVFYTAQPARQHDEERGLLNDMWGQGLPKAPEQKNIVAALTPEHDDVVLTKWRYSAFFRSDLAEQMADLGRDQLIIGGVYAHIGCLTTANEAFMRNIQPFMVSDALADFSRDEHLMALHYTLGRCGRVVDTQEVVTAITTAEAQSEGLPASFAALRHEILPLLDDEDADEIENDDNLIDYGLDSIHIMNLASRWNPLAPQINFMELAKTPTLHHWWQLMQKQVTTTGEAA

SEQ ID NO: 93000 - protein, 123 aa, Vibrio maritimus
  misc_feature (1)..(123): tr|A0A090S2Y3|A0A090S2Y3_9VIBR Isochorismatase OS=Vibri o maritimus OX=990268 GN=JCM19235_448 PE=4 SV=1
MSESVLEQSKAGISGWQSAFNSQDAAGCAARYAEDAVMVAKPFGTFEGREAIEAFWQGIMDQGFADVDYTNVKWVKENDTGYILSADWTMNKAFGVVHKELWEIQEDGLSRLTYDEFEVLGER

SEQ ID NO: 93001 - protein, 294 aa, Vibrio metschnikovii
  misc_feature (1)..(294): tr|C9P809|C9P809_VIBME Isochorismatase of siderophore b iosynthesis OS=Vibrio metschnikovii CIP 69.14 OX=675813 GN=VIB_002651 PE=4 SV=1
MAIPKIAAYHIPSSDSFPANKVNWQLDAKKAVLLVHDMQNYFINFFDRAEAPIPELIKNIQLIKQAAGLANIPVVYTAQPANQDPEERALLTDFWGTGLTQDTEIISDVAPKEEDITYTKWRYSAFKKTPLLEWMNETGRDQLIIVGVYAHIGILSTALDAFMLDIKPFVVGDAVADFSLAEHQQMLAYITGRAGSVKSTQRVIEEIHHSIQFVAPLSLEVMQKDIAEMLDLDIEDVDVDENLILIGLDSIRAMRLFEGWRNQGANIAFSEIIKKVTLREWWQTIEKAKNYEIA

SEQ ID NO: 93002 - protein, 297 aa, Vibrio nigripulchritudo
  misc_feature (1)..(297): tr|U4DYM2|U4DYM2_9VIBR Vibriobactin-specific isochorism atase OS=Vibrio nigripulchritudo FTn2 OX=1238441 GN=vib B PE=4 SV=1
MAIPKIASYDLPEHKEFPENRTNWKINPSDAVLLIHDMQEYFVNYYEVNASPMADILKNIQELKKKAKEAGIAVVYTAQPANQDPKERALLTDFWGPGLNGDHTPVVSVLSPEEDDIEYVKWRYSAFKKTPLLDYLQANGKTQLIISGIYGHIGILSTALDAFMLDIQPFIVGDAIADFSREDHIHTLNYVAGRAGSIKTLDEIVEEIKSSECPALSLDILQSDVAETLGVSAEDIDVNENLMFMGLDSMRAMTLVEKWNKQGANVSFSQLIEAVSLQEWWQTIQATANNKKEEVSA

SEQ ID NO: 93003 - protein, 294 aa, Vibrio palustris
  misc_feature (1)..(294): tr|A0A1R4B877|A0A1R4B877_9VIBR Isochorismatase OS=Vibri o palustris OX=1918946 GN=entB PE=4 SV=1
MSIPKLNSYSLDNLLDGITNKVSWNLDANRAVLLIHDMQQYFLDFYADDALKARLIQTVSEIKAACKAQGIPVVYTAQPGDQAPQDRALLTDFWGTGLKASDQVTRIVPELAPDTDDTVLTKWRYSAFKRSPLLETMQEQQRDQLIIVGVYAHIGCMLTAADAFMYDVQAFFVADGLGDFSREDHIDALQYVAKRCGYVTNQADILQCIQEQQSVATLPTSKAQLKSLIAQLIEIEENDIYNDDNLLDLGLDSVRAMMLLGRLQNAGLNTSFAEFASAPSIDGWWQLIEPQIAA

SEQ ID NO: 93004 - protein, 127 aa, Vibrio ponticus
  misc_feature (1)..(127): tr|A0A090P9G2|A0A090P9G2_9VIBR Isochorismatase OS=Vibri o ponticus OX=265668 GN=JCM19238_4518 PE=4 SV=1
MNTIEQNAVLEACKQGIKAWQTAFNQQDAQGCAAQYQESCTMHARPFGEFTGREAIQAFWQDIMDKGFKDVDYTEVEWQPHGDDAFILSAKWTMNQAFGVVHKEVWQIDVDGKARLASDDFEVLGER

SEQ ID NO: 93005 - protein, 298 aa, Vibrio quintilis
  misc_feature (1)..(298): tr|A0A1M7YXX8|A0A1M7YXX8_9VIBR Vibriobactin-specific is ochorismatase OS=Vibrio quintilis OX=1117707 GN=vibB PE =4 SV=1
MAIPKIASYDLPDSGLFPQNKVNWQIQPQRAVLLIHDMQSYFLNFFNPDAAPVPELKRNISALKDAAHQAGIPVIYTAQPVNQDPEERALLTDFWGSGLTGDAEIVPELSPDQDDICLTKWRYSAFKKNELQDYMQIHGKDQIIICGVYGHIGILSTALEAFMLDIQPFIIGDAIADFSAGEHEWALKYVAGRAGSVKSLQTALGEISSADKASSGLTLDTMQHDIAQVLEIAIDEVDVTENLLFLGLDSVRAMTLLEKWQQQGATITFAQLMEKVTLQEWWQLIDQQAVTTQASHAA

SEQ ID NO: 93006 - protein, 294 aa, Vibrio ruber
  misc_feature (1)..(294): tr|A0A1R4LTW5|A0A1R4LTW5_9VIBR Vibriobactin-specific is ochorismatase OS=Vibrio ruber DSM 16370 OX=1123498 GN=v ibB PE=4 SV=1
MAIPKIAAYQIPSHDAFPDNKVNWQLDAKKAVLLIHDMQDYFINFFDKKEAPIPELIKHIQAIKQAAGEAGVPTVYTAQPANQDPQERALLTDFWGTGLTQDTAIITDVAPQDNDITYTKWRYSAFKKTPLLEWMNETGRDQLIIVGVYAHIGILSTALDAFMLDIQPFVVGDAVADFSLADHQYALAYVTGRAGSVKSAQRVIEEINQSAQSAAAISLEMMQKDVAQILDLDIEDIDVDENLMLLGLDSIRAMSLFEGWRKHGVNIAFAEIVKKVTLREWWHLIDNAQTQQVA

SEQ ID NO: 93007 - protein, 285 aa, Vibrio sp.
  misc_feature (1)..(285): tr|A0A0H3ZPM4|A0A0H3ZPM4_9VIBR Isochorismatase OS=Vibri o sp. 1S_269 OX=1652828 PE=4 SV=1
MAIPKIASYQVLPLESFPTNKVDWVIDPKKSVVLVHDLQAYFLNFFDKALSPVPELLRNVNKVTESARSAGIPVVYTAQPANQDPNERALLTDFWGAGLTQDTEIVPEVSPQPEDIQYTKWRYSAFKKTPLLEWMKEEQRDQLIIVGVYGHIGILSTALDAFMLDIKPFVIGDAIADFSKEDHLNTLKYVAGRSGSVKSVDEFIESVTPCSSSGELSLESMRQDVANILDVDLDEVDVDENLIFLGLDSIRVMTLHSRWKKEVLILILLRWSGKIRLKIGGILFR

SEQ ID NO: 93008 - protein, 294 aa, Vibrio spartinae
  misc_feature (1)..(294): tr|A0A1N6M7L3|A0A1N6M7L3_9VIBR Vibriobactin-specific is ochorismatase OS=Vibrio spartinae OX=1918945 GN=vibB PE =4 SV=1
MAIPKIAAYPIPTSDSFPVNKVNWQLDAKRAVLLIHDMQDYFINFFDKKAEPVPALIQHIQSIKQAASTAGIPVVYTAQPANQDPQERALLTDFWGTGLTQDTAILTDVAPQDNDTTYTKWRYSAFKKTPLLEWMNDTGRDQLIIVGVYAHIGVLSTALDAFMLDIQPFVVGDAVADFSLADHQYALQFITGRAGSVKSAQRVIDEIQQSASSVTSLDLDIMQQDVAEILDLDIEDIDVDENLMLLGLDSIRAMSLFEKWRKHGVDVTFSEVIQQVTLRSWWQTMEAAQARAVA

SEQ ID NO: 93009 - protein, 304 aa, Vibrio tapetis
  misc_feature (1)..(304): tr|A0A2N8ZM74|A0A2N8ZM74_9VIBR Isochorismatase OS=Vibri o tapetis subsp. tapetis OX=1671868 GN=entB PE=4 SV=1
MAIPSIAAYPLNSLEAQNRVDWNIDPDRAVLLVHDMQQYFLNFYAQDSELVKSLLSNIQEVKRACKAANIPVVYTAQPGGQSAKDRALLTDFWGPGLIDDESITKIHPSLTPEDEDIVYTKWRYSAFQRTPLENMMKESGRDQLIIVGIYAHIGCLQTTCEAFMMDIQAFMISDATADFSQTDHQMALDYVAGRCGYVLDKEQLIAQLPNQNSNEKGSEYPSAPSVYSIPKSEADLKAQIANLLSISVDELTMDDSLLDFGLDSIRMMSLVSSWQQSGLSVTFMDLATSPKVNEWWELIQHKTE

SEQ ID NO: 93010 - protein, 179 aa, Vibrio variabilis
  misc_feature (1)..(179): tr|A0A090SJ80|A0A090SJ80_9VIBR Isochorismatase OS=Vibri o variabilis OX=990271 GN=JCM19239_5404 PE=4 SV=1
MLEQNNTQLMIIDVQGKLAQLMHDKEILFRNLNTLTKAASLMELPIIWVEQIPDKLGPTIEEISQELSHQTPIAKDVFSAWGEANVREATNASDRKQVLLVGIEAHICVHQTACDLLQAGYEVHLVTDAVSSRTQANKDLALKRLTQEGAVLTSTEMALFELQKVARGEQFKSLLKLIK

SEQ ID NO: 93011 - protein, 295 aa, Vibrio vulnificus
  misc_feature (1)..(295): sp|P74965|VENB_VIBVU Probable isochorismatase OS=Vibrio vulnificus (strain CMCP6) OX=216895 GN=venB PE=3 SV=2
MGIPKIAGYPLPTPAEFPDNRTGWTIDPDQAVLLIHDMQEYFVNYYQPDSSPVVDIIQHIQRLKAAAKKAGIPVIYTAQPANQHPTDRALLTDFWGPGLNGDHVPIVEALSPEEGDIEYVKWRYSAFKKTPLLEFMRAQGKSQLIISGIYGHIGILSTTLDAFMLDIQPFVIGDAIADFTREDHLRTLEYVASRSGSVKRLDEALDEIRSQKPLTLEQIQQDVATSLGIQPDEVDLDEDLMFVGLDSMRAMVLVEKWHQQGENISFGQLMEAASLREWWLVIEQARNEEQTMAVA

SEQ ID NO: 93012 - protein, 177 aa, Virgibacillus dokdonensis
  misc_feature (1)..(177): tr|A0A2K9IXL0|A0A2K9IXL0_9BACI Isochorismatase OS=Virgi bacillus dokdonensis OX=302167 GN=entB PE=4 SV=1
MLKSLEKTAVLFVDIINDFHFDGGKALASNTKEILPHLMSLRKFAKTNKLPIIYVNDHYGLWQADFRKIIDHCYNDASKDIIEALKPDDQDYFLIKPQHSAFFQTPLQSLLSELDKDSLILAGIAGDICILFTAKDAYMYGYKMHIPENCMASEGKDNNAYALYLLHAVMKADTTAI

SEQ ID NO: 93013 - protein, 189 aa, Weissella confusa
  misc_feature (1)..(189): tr|A0A5E8F2M9|A0A5E8F2M9_WEICO Isochorismatase OS=Weiss ella confusa LBAE C39-2 OX=1127131 GN=entB PE=4 SV=1
MKALLIIDYTNDFVAPEGPLTAGESAQALAPRLVELADEFLANGDAVILPTDLHVPNDPYHPETKLYPAHNVADTPGRDYYGALADWVAEHKDDEHVWIYPKNRYSSFANTDLDNYLRSRDIKDIHLTGVDTDICILHTAVDAYNLNYNITVHADGVASFTPTGHRWALWHFKNVLGATVTPDIDYNLD

SEQ ID NO: 93014 - protein, 183 aa, Xanthomonas campestris
  misc_feature (1)..(183): tr|B0RWJ4|B0RWJ4_XANCB Putative isochorismatase OS=Xant homonas campestris pv. campestris (strain B100) OX=5091 69 GN=XCCB100_3866 PE=4 SV=1
MSTQRSALLIVDMFNRFDFDGGEQLAHRAQGAARSIDALAQRYRQAQRPVLYANDNFADWHADLPALIALASQADARGCEIARLLTPYPQDYHLLKPKHSAFLNTPLAPLLKDLRVEHLVITGVALDVCVLATAIDATAHGFAVSVPRDCATAETDVRETCARTILQDGFHAALARSASIEPA

SEQ ID NO: 93015 - protein, 179 aa, Xenorhabdus bovienii
  misc_feature (1)..(179): tr|D3V528|D3V528_XENBS Putative Isochorismatase OS=Xeno rhabdus bovienii (strain SS-2004) OX=406818 GN=XBJ1_363 9 PE=4 SV=1
MKALIVIDMLNDFVTGVLANEEDAMKMIPSIQRMIKHARNNPDWLVVYANDAHRADDREMEIWGKHAMAGTWGADVIDELAPIGMEREIVSPKRFYNAFDGTGLEDVLAQYGVTEVVLTGQHIHCCVHHTAYGAFIRGYGITVLSDAVCAFPGIDQQAALDYLKTIYGAEITTSKAFGV

SEQ ID NO: 93016 - protein, 206 aa, Xenorhabdus cabanillasii
  misc_feature (1)..(206): tr|W1IKS5|W1IKS5_9GAMM Putative isochorismatase OS=Xeno rhabdus cabanillasii JM26 OX=1427517 GN=phzD PE=4 SV=1
MNIPKIESYSLKFPEFNIISRVKWKHDNNRSILLVHDMQTYFLNFFHSDLRQELIRNCQKLIAYSRKNNIPIVYTAQRGDMTKKERGLLYDIWGKGMSRKDEHTAIVKELAPQPEDSILAKWRYSAFHATSLGDIFLKEKRDQIILCGVFAHIGIQTSSVDAYSRDIEVFLIQDAIADFSKQIHLQALIYADKCCAKVLPTQEICK

SEQ ID NO: 93017 - protein, 182 aa, Xenorhabdus doucetiae
  misc_feature (1)..(182): tr|A0A068QVI8|A0A068QVI8_9GAMM Putative Isochorismatase OS=Xenorhabdus doucetiae OX=351671 GN=XDD1_3070 PE=4 S V=1
MKALIVIDMLNDFVTGVLANEKQATEIIPVIQRVINYARNQPDWLVVYANDAHYADDREMGIWGKHAMAGTWGAEVVDALAPIGSEREIVSPKHFYSAFDGTDLDEVFGQYGVTEVVLTGQHTNCCVRHTAYSAFTRGYGITVLSDAVCVLPEVDHSEALDYLKTVYGVEITTSTELGVPSK

SEQ ID NO: 93018 - protein, 65 aa, Xenorhabdus ehlersii
  misc_feature (1)..(65): tr|A0A2D0IKM9|A0A2D0IKM9_9GAMM Isochorismatase OS=Xenor habdus ehlersii OX=290111 GN=Xehl_03776 PE=4 SV=1
MCVTATAIKALELGYENFVCADACASRDLKYIDGSLVDADSVHKAAMAALNDRYATLVNCSDVIN

SEQ ID NO: 93019 - protein, 210 aa, Xenorhabdus nematophila
  misc_feature (1)..(210): tr|N1NLL8|N1NLL8_XENNE Isochorismatase OS=Xenorhabdus n ematophila F1 OX=1306162 GN=XNC3_2330017 PE=4 SV=1
MKKILSYPLPIYADLPQSTANWLADRHRAALLIHDMQKYFVDFFKTETNPIIGVISNIYMLLSIARNFNIPVFYTAQPGSMTPEQRGLLKDIWGEGMKSIDEHREIIPLLTPIKDEIVLTKWRYSAFFKSNLLNHLRDLNRSQLIICGVYAHIGCLSTAIDAYSHDIETFFVSDAVADFSEEKHHMALKMAAEICAVVASTEQIIVNLRK

SEQ ID NO: 93020 - protein, 294 aa, Xenorhabdus poinarii
  misc_feature (1)..(294): tr|A0A068R3S8|A0A068R3S8_9GAMM Isochorismatase OS=Xenor habdus poinarii G6 OX=1354304 GN=entB PE=4 SV=1
MSIPKLQDYTLPDEATLPANKVEWKLEPQRAALLIHDMQEYFLNFWGKESKMVQQIIDNIVILRARCHELGIPVFYTAQPDQQSDVERALLNDMWGPGLNRYPEQQKIVAALSPEQQDTVLVKWRYSAFQRSDLETQLKERKRDQLMICGVYAHIGCLTTATDAFMRDIQAFMISDALADFSREEHMMALRYTAGCSGQVLSSGMVLSALDSSAAESQWDRERLLTLLQSTLDEDVHDIDDDENLLDYGLDSLRMMSFVSKRRQEGYDLDFTSLMKQPTLRNWLTLLNGNLEAK

SEQ ID NO: 93021 - protein, 209 aa, Xenorhabdus szentirmaii
  misc_feature (1)..(209): tr|W1IUS4|W1IUS4_9GAMM Putative isochorismatase OS=Xeno rhabdus szentirmaii DSM 16338 OX=1427518 GN=phzD PE=4 S V=1
MSRTLKSESYGLGNIRIPSHQPLTWKIKTESCALLIHDMQRYFVHALPDNPAVNLINSTVKILRWAREKNIPVFYSAQPGRMTMEQRGLLVDLWGPGMRTTEEDRQIIDALFPYPEDTVLTKWRYSAFHQSDLADKLCEHQCDSLIITGIYASVGIQATGIDAFSHNIHPFVVADAIADFTQAGHQNAVDYMADNCARVLTSADVVNYE

SEQ ID NO: 93022 - protein, 212 aa, Xinfangfangia sp.
  misc_feature (1)..(212): tr|A0A3P5XFA6|A0A3P5XFA6_9RHOB Isochorismatase OS=Xinfa ngfangia sp. CIP 111625 OX=2483812 GN=dhbB_2 PE=4 SV=1
MAGLPQIAPYPLPQGDEIPAARGPWRVQTARAALLIHDMQLYFLRPFARQESPIAPAIANIARLAAHARARGIPVFYTAQEGDQPRCDRGLQADLWGPGMRADPEHQAITPELAPEPGDFVLVKHRYSAFQRSNLESLMRARGRDQLIVCGVYAHIGCLMTAAEAFQRDIEPFLAADALADFSRADHDLALKWAAGRCGVAMASDALIAALD

SEQ ID NO: 93023 - protein, 175 aa, Yersinia enterocolitica
  misc_feature (1)..(175): tr|A0A0H3NN53|A0A0H3NN53_YERE1 Isochorismatase OS=Yersi nia enterocolitica subsp. palearctica serotype O:3 (str ain DSM 13030 / CIP 106945 / Y11) OX=930944 GN=Y11_2384 1 PE=4 SV=1
MTKEKVVIVIDMQNGVLANPRFDSAGRVARINQLIDHADQVIFIQHIEDDMTEGSELWQLLPELHHPESAISVNKTACDSFYRTSLDNIIAKFGATHLTICGCATDYCVDTTVKIAASKGYALTIASDAHTTADRQHVTAQQLIAQHNEVWSELAIPGNRITVKTTQQILTDWAG

SEQ ID NO: 93024 - protein, 302 aa, Yersinia frederiksenii
  misc_feature (1)..(302): tr|A0A380PU51|A0A380PU51_YERFR Nicotinamidase/isochoris matase family protein OS=Yersinia frederiksenii OX=2948 4 GN=entB PE=4 SV=1
MAIPVLPAYDLPKAGQFPANKVNWQFNPARAVLLIHDMQDYFVSFYGENNPLIQQVIANIAALRDYCKQQGVPVIYTAQPNHQSAEDRALLNDMWGAGLNHHPAKQRVVPELAPDEDDEVLVKWRYSAFYRSPLRQIMTDKGRDQLVICGIYGHIGCLTTATDAFMQDIQPFMVADAIADFSLDEHLMALKYVATRSGRVIFADEIVAHGNNSVANFSKNELKQQLLALIDESAEEFDEDENLIDYGLNSVHIMALATQWRQQGIELSFVDLAKSPSLNGWWKLLEKQLAAQTDNLTIAGVE

SEQ ID NO: 93025 - protein, 300 aa, Yersinia intermedia
  misc_feature (1)..(300): tr|A0A0H5LQ22|A0A0H5LQ22_YERIN Isochorismatase OS=Yersi nia intermedia OX=631 GN=entB PE=4 SV=1
MAIPVLSAYDLPKLGQFPANKVNWQFNPARAVLLIHDMQDYFVSFYGEDNPLIQQVIANIAALRQYCKQQGVPVIYTAQPNHQSAEDRALLNDMWGAGLNNHPAKQRVVSELTPDVEDEVLVKWRYSAFYRSPLRQIMTDKGRDQLVICGIYGHIGCLTTATDAFMQDIQPFMVADAIADFSLDEHLMALKYVATRSGRVIFTEEIVTNGNTANFSKDELKQQLLALVDESAEDFDENENLINYGLSSVHIMALATQWRQQGIELNFVDLAKSPSLNNWWILLEQQLANQTDRPALAGAE

SEQ ID NO: 93026 - protein, 302 aa, Yersinia kristensenii
  misc_feature (1)..(302): tr|A0A0T9L4P1|A0A0T9L4P1_YERKR Isochorismatase OS=Yersi nia kristensenii OX=28152 GN=entB PE=4 SV=1
MAIPVLSAYDLPTVGQFPANKVNWQFNPARAVLLIHDMQDYFVSFYGENNHLIQQVIANIAALRNYCKQQRIPVIYTAQPNHQSAEDRGLLNDMWGAGLNNHPAKQRVVSELTPDTDDEVLVKWRYSAFYRSPLRQIMADKGRDQLVICGIYGHIGCLTTATDAFMQDIQPFMVADAIADFSLEEHLMALKYVATRSGRVIFTDEIVANVNENTLIFSKEKLKQQLLALIDENADDFDENENLIDYGLSSVHIMALATQWRQQGIELSFVALAKNPSLNGWWKLLEPQLIDLDKNVSLVGAE

SEQ ID NO: 93027 - protein, 300 aa, Yersinia massiliensis
  misc_feature (1)..(300): tr|A0A0T9PXG8|A0A0T9PXG8_9GAMM Isochorismatase OS=Yersi nia massiliensis OX=419257 GN=entB PE=4 SV=1
MAIPVLSAYDLPKLGQFPANKVNWQFNPARAVLLIHDMQDYFVSFYGEDNPLIQQVIANIAALRQYCKQQGVPVIYTAQPNHQSAEDRALLNDMWGAGLNNHPAKQRVVSELTPDAEDEVLVKWRYSAFYRSPLRQIMTDKGRDQLVICGIYGHIGCLTTATDAFMQDIQPFMVADAIADFSLDEHLMALKYVATRSGRVIFTEEIVTNGNTANFSKDELKQQLLALVDESAEDFDENENLINYGLSSVHIMALATQWRQQGIELNFVDLAKSPSLNNWWILLEQQLANQTDRSALAGAE

SEQ ID NO: 93028 - protein, 294 aa, Yersinia nurmii
  misc_feature (1)..(294): tr|A0A0T9L0D2|A0A0T9L0D2_9GAMM Isochorismatase OS=Yersi nia nurmii OX=685706 GN=entB PE=4 SV=1
MAIPTLSAYQLPQAEHVPANKVGWQFDPTKAVLLIHDMQDYFVSFYGDNNPMINRVIDNIADIRRYCKRQGVPVIYTAQPNNQSPEDRALLNDMWGAGLNDHPAKQRVVSALTPDEDDEILVKWRYSAFHRSPLEQMMKEMGRDQLVICGIYGHIGCMITATDAFMKDIKPFMVADAVADFSLEEHLMALKYVATRSGRVIFTEELLGEANQSDNRFSKESLKAQLLALIDENAEDFDEDENLIDYGLNSVHIMALVTEWRQQGIELSFVDLAKSPSLNGWWALFEKHRAAGAK

SEQ ID NO: 93029 - protein, 294 aa, Yersinia ruckeri
  misc_feature (1)..(294): tr|A0A085U3B8|A0A085U3B8_YERRU Isochorismatase OS=Yersi nia ruckeri OX=29486 GN=entB PE=4 SV=1
MAIPTLSAYPLPQAKQIPVNKVDWQFDPAKAVLLIHDMQEYFVSFYGDNNPLIQQVIEHIVVLRRFCKSNGIPVIYTAQPNNQSSEDRALLNDMWGAGLNDHPAKQRVVHALTPDKDDKILVKWRYSAFHRSPLESMMKEMGRDQLVICGIYGHIGCMITATDAFMKDIKPFMVADAVADFTLEEHLMALKYVATRSGCVLFTEDLLGKSTAAAEKFSKEALKTQILALIDESAEDFDEDENLIDYGLNSVHIMALVTEWRQQGITLSFVDLARAPSLNGWWAVFEKQCLMGAK

SEQ ID NO: 93030 - protein, 283 aa, Yokenella regensburgei
  misc_feature (1)..(283): tr|A0A2X2S9M6|A0A2X2S9M6_9ENTR Isochorismatase OS=Yoken ella regensburgei OX=158877 GN=entB PE=4 SV=1
MAIPKLQAYALPGADDIPANKVDWAFEPERAALLIHDMQEYFLNFWGENSPMMETVVANIAALRQYCKQHHIPVYYTAQPKTQSDEDRALLNDMWGPGLTRSPEQQQVIAALAPDEADTVLVKWRYSAFHRSPLEEMLKQTGRNQLIITGVYAHIGCMTTATDAFMRDIKPFFVADALADFSREEHLMSLNYVAGRSGRVVMTENLLPVPLSKAALRTTILPLLDESDVPLDDENLIDYGLDSVRMMSLAARWRKVHGDIDFVMLAKNPTIDAWWTLLSREVK

SEQ ID NO: 93031 - protein, 289 aa, Acinetobacter baumannii
  misc_feature (1)..(289): tr|A0A385EYU0|A0A385EYU0_ACIBA Enterobactin synthase co mponent B OS=Acinetobacter baumannii WM99c OX=945555 GN =entB PE=4 SV=1
MAISKISTYLMPERESYPNNKTDWQLDPSRAVLLIHDMQRYFLNFYDAESELIKTVVNHLVQLRTWAHQNNVPVVYTAQPYEQPAADRALLNAMWGPGLPASTIDQQKIIDQLSPAEHDIVLTKWRYSAFKRSDLLERMQNWNRDQLIIGGVYAHIGCMVTAIEAFMSDIQPFLVGDAVADFSEEEHRLALKYVSSRCGQVVDTESVVGQVATGITRPWLEQKVQQLIEEDELDPEENLILYGLDSLRIMQFSSELKAQGINISFEELGRTPTLSNWWSLVDARQRIAG

SEQ ID NO: 93032 - protein, 556 aa, Aeromonas salmonicida
  misc_feature (1)..(556): tr|T0QTH2|T0QTH2_AERSA Enterobactin synthase component EntE OS=Aeromonas salmonicida subsp. pectinolytica 34me l OX=1324960 GN=entE PE=4 SV=1
MTQANRFLPYTRWPAELAEQYRAKGYWRGEPLTTMLDRQCEVAPDATAILCGERSFSYHELDAASSRLAGRLARHGLGVGDTALVQLPNVAEFYLVFFALLKAGIAPVNALFSHNRLELASYAEQIRPRLFIGSLAHPLFASGERHSDLLRGIGAELVLLDGESGELGLTHWLSDLAKREGLAVPAYGPSPADEVAFFQLSGGSTGTPKLIPRTHDDYYYSVRRSNEICGLGPHTRYLCALPAPHNFPLSSPGALGVFEAGGAVVLAPDPGPMSCFPLVARHQVNLTSLVPPAVSLWLQAAESDPSVRSQLPSLDLLQVGGAKLAEAVARKITPLLGCRLQQVFGMAEGLVNYTRLSDLDEKIIHTQGRPMSPDDEVRILDEAGNPVTPGQPGALHTRGPYTFRGYYQSQAHNARVFDADGFYCSGDLVVQDADGYLTVVGRQKDQINRGGEKIAAEEVENQLLHHPAITQAALVSMPDSAMGEKSCAFIVSTDPGLKPLALRKFLRERGVADFKLPDRFETLDALPMTAVGKIDKQGLRAQIAEVIAAGQPLTTA

SEQ ID NO: 93033 - protein, 491 aa, Aliiroseovarius pelagivivens
  misc_feature (1)..(491): tr|A0A2R8AMB7|A0A2R8AMB7_9RHOB Enterobactin synthase co mponent E OS=Aliiroseovarius pelagivivens OX=1639690 GN =entE PE=4 SV=1
MTVIQSNSDSMKQAGSIGTVFMAHVLADPDAPFFIQGDTQISRGDFLRQVVGVRAFFSAQGIAAGAVVGLANTDQIRSFAAMFALWSLGAAPLVLDYRISQAERQHVAQAAGVSAIFSDFKGLSAQSGCHSLPRDLPLSDDIMALTFPSDPDAIVDFRQSSGTTALPKLQPISAQTLFDMTEKRCDPPSHVTQGNIVSCLNLAFAGTRYLWFRNAYLGRAIISVPLFFTPAQLDTAMRHPLAEEATLPPVIMKRLVEYVDALDGQPAHPRYPNLSKLQSIGGPLTGQMLLDVQRLLSDRISTTYSFSEAGVVSRLYGDDIARNPTAAGRVLSGVTVATEDQDGEPLPAHMPGSLVVTKDGETFRPGDHGYLSDEGLLYITGRSAERFCRNSVTFTASDVAERIRSLDTVTDCCVFAAPGQLDGEDIVVAAIESDPANQVDIASTLRSLMLAEIRPDHIRCYPALPRGSAMKVSIQDLKQHHLQEPEKYHDL

SEQ ID NO: 93034 - protein, 184 aa, Bacillus pumilus
  misc_feature (1)..(184): tr|A0A498U5V6|A0A498U5V6_BACPU Enterobactin synthase co mponent B OS=Bacillus pumilus OX=1408 GN=entB PE=4 SV=1
MSKQKKALLIIDMINDFDFEMGHVLAEKTEQMTNKILALKQHAFKENWPIIYINDHYGLWKADIQAVMETCKNERSAPILEKMTPSKDNYFLIKPKHSAFYGTALETLLNELGVEDIILTGIAGNICVLFTANDAYMREYNLIVPKDCIASNDDRDNDYALTMMENVLLAKITTAKEITNENQT

SEQ ID NO: 93035 - protein, 184 aa, Bacillus safensis; identical to SEQ ID NO: 93034
  misc_feature (1)..(184): tr|A0A5C0WGC9|A0A5C0WGC9_9BACI Enterobactin synthase co mponent B OS=Bacillus safensis OX=561879 GN=entB PE=4 S V=1

SEQ ID NO: 93036 - protein, 86 aa, Bacillus sp.
  misc_feature (1)..(86): tr|A0A553ZSE2|A0A553ZSE2_9BACI Enterobactin synthase su bunit EntD (Fragment) OS=Bacillus sp. P16(2019) OX=2597 270 GN=entD PE=4 SV=1
ALREYGYKCVPAIGELRQPVWPAEVYGSISHCGTTALAVVSRQPIGIDIEEIFSVQTARELTDNIITPAEHERLADCGLAFSLALT

SEQ ID NO: 93037 - protein, 311 aa, Bacillus velezensis
  misc_feature (1)..(311): tr|A0A410L6C3|A0A410L6C3_9BACI Isochorismatase OS=Bacil lus velezensis OX=492670 GN=dhbB PE=4 SV=1
MFTLAIPSIPAYALPTASDMPENKVSWTLNPKRAVLLIHDMQNYFVDAFAKGEAPITEAAQNIKKIKEQCKALGIPVVYTAQPGSQDPADRALLTDFWGPGLKSGPYEEKVIPELAPDDQDIVLTKWRYSAFKRTNLLDIMRESGRDQLMITGIYAHIGCLVTACEAFMDDIQSFFIGDAVADFSSEKHKMAIEYASQRCAYTALTNEVLELLGGAPVSEGEEKASAVLTKDRVREQIAAILQESPSDIPDHEDLLDRGLDSVRIMSLVEQWRRDGAEVTFVELAENPTLEEWWRLLSSRSQKVLPNADYL

SEQ ID NO: 93038 - protein, 224 aa, Buttiauxella sp.
  misc_feature (1)..(224): tr|A0A5C5DAQ5|A0A5C5DAQ5_9ENTR Enterobactin synthase su bunit EntD OS=Buttiauxella sp. B2 OX=2587812 GN=entD PE =3 SV=1
MEHQLSQFDISPDIHVYRVDFDAATFKPEDLLWIPHHNRLSNAVNKRKAEHLAGRIAANQALRFHGIKDYIPGIGLHREPCWPPGFTGSITHSGNVALATVITDNPLQRMGIGIDYEEIIAPQVAEEIYGGIIDCAEKELISASPFSFNYALTLVFSAKESLFKALFRHVGRYFDFSAASLNEIDYQHLSLTLNHSLGPYQKGDTFIATWKGDAAQLITLIRLG

SEQ ID NO: 93039 - protein, 207 aa, Citrobacter amalonaticus
  misc_feature (1)..(207): tr|A0A515AEH2|A0A515AEH2_CITAM Enterobactin synthase su bunit EntD OS=Citrobacter amalonaticus OX=35703 GN=entD PE=3 SV=1
MQTTHSSLILAHHTLHGVAFEPDTFHEHDLLWLPHHAQLARAGRKRKAEHLAGRIAAVQALREWGHKNVPGMGEQRQPLWPEGLSGSISHCATTALAVVSYQPVGVDIEAIFTAQTAAELAGSIVTEAEKVRLAGSGLPFEQALTLAFSAKESAFKATPKRSQAGCGFMHYHILDVQHDQMRLQAIDQIWHVQWLVKNSHVITVATG

SEQ ID NO: 93040 - protein, 1296 aa, Citrobacter braakii
  misc_feature (1)..(1296): tr|A0A4R0MCX3|A0A4R0MCX3_CITBR Enterobactin non-ribosom al peptide synthetase EntF OS=Citrobacter braakii OX=57 706 GN=entF PE=3 SV=1
MTQRLPLVAAQPGIWMAEKLSTLPSAWSVAHYVELTGELDAPLLAKAVVAGLQQADTLRMRFSEDNGEVWQWVDSALAFAPPEIIDLREKSDPHATARALMQADLQQDIRADGTKPLVFHLLIQVGEKRWYWYQRYHHLLVDGFSFPAITRQIAAIYRVWLHGEPTPESPFTPFSEVVEEYQQYRQSDAWQRDGAFWTEQRKQLPPPASLSNKPLPGRSASADIIRLKLTAPEGEFRRLAARMPDVQRADLALALVALWLGRLCSRMEYAAGFIFMRRMGSAALTSTGPVLNVLPFGVQLNAAESLPALAQRLAAQLKKMRRHQRYDAEQIVRDSGRAAGAEPLFGPVLNVKIFDYQLNIPGVQAQTHTLATGPVNDLELALFPDENGGLSIEILANKQRYDAATLAQHASRLTALIAQFADNPSLCCGDAGMLLPTEHERLAKINDTTVAIPSTTLSALVAQQADKTPDAPALADARYQFSYREMRQQVVALARRLRERGVQPGDSVAVALPRSVFLTLALHGIVEAGAAWLPLDTGYPDDRLRMMLEDAKPKLLIATEEQLARFSDIPELESLCYNAPLPEEDAAPLALSQPNHTAYIIFTSGSTGRPKGVMVGQTAIVNRLLWMQNHYPLTADDVVAQKTPCSFDVSVWEFFWPFIAGAKLVMAEPEAHRDPLAMQQFFAQSGVTTTHFVPSMLAAFVASLTPETARESCASLKRVFCSGEALPADLCREWEQLTHAPLHNLYGPTEAAVDVSWYPAWGDDLAAVTGNSVPIGYPVWNTGLRILDAMMRPVPFGVAGDLYLTGIQLAQGYLGRADLTASRFIADPFNPGERMYRTGDVARWLENGAVEYLGRSDDQLKIRGQRIELGEIDRVMQQLPDVEHAVAHACVFNQAAATGGDARQLVGYLVSQSGLPLDTSALRETLREKLPAHMVPTVLLQLAELPLSANGKLDRKALPMPQLTSRTSGRAPRAGTETAIAQSFAALLDCEVNDVEADFFALGGHSLLAMKLAAQLSQIFERQVTPGQIMVASTVEQLSALLESNDDEQSQRLGFETLLPLRESHGPTLFCFHPASGFAWQFSVLSRYLSPQWSIIGIQSPRPDGPMQTAENLDAVCEHHLATLLSQQPHGPYYLLGYSLGGTLAQGIAARLHARGETVAFLGLLDTWPPETQNWQEKEANGLDPAVLAEIEREREAFLAAQQGNASEALFNAIEGNYADAVRLLTTAHSVPFAGHATLFVAERTLVPGVSPERSWSPWISSLDVYRQDCAHVDIISPSSFEAIGPIINTLINKSV

SEQ ID NO: 93041 - protein, 1296 aa, Citrobacter freundii
  misc_feature (1)..(1296): tr|A0A241QE65|A0A241QE65_CITFR Enterobactin non-ribosom al peptide synthetase EntF OS=Citrobacter freundii OX=5 46 GN=entF PE=3 SV=1
MTQRLPLVAAQPGIWMAEKLSTLPSAWSVAHYVELTGELDALLLAKAVVAGLEQADTLRMQFSEDNGEVWQWVDPALTFAQPEIIDLREKSNPHEAARALMQADLQQDIRADGNKPLVFHQLLQVGDKRWYWYQRYHHLLVDGFSFPAITRQIAAIYRAWLDGESTPDSPFTPFAEVVEEYQQYRQSDAWQRDGAFWREQRKQLPPPASLSNNPLPGRSASADIIRMKLTAPEGAFRRLAARMPDVQRADLALALVALWLGRLCSRMDYAAGFIFMRRMGSAALTSTGPVLNVLPFGVRLDAAESLPALAQRLAGQLKKMRRHQRYDAEQIVRDSGRAAGAEPLFGPVLNVKIFDYHLNIPGVQAQTHTLATGPVNDLELALFPDENGGLSIEILANKQRYDAETLAQHASRLIGLIEQFADNPSLCCGDAGMLLPTEHERLAKINATTVEIPFTTLSALVTQQADKTPDAPALADARYQFSYREMRQQVVALASLLRERGVRPGDSVAVALPRSVFLTLALHGIVEAGAAWLPLDTGYPDDRLRMMLEDAKPKLLIATEEQLARFSDIPGLESLCYDSPLPAEDAAPLALSQPNHTAYIIFTSGSTGRPKGVMVGQTAIVNRLLWMQNHYPLTADDVVAQKTPCSFDVSVWEFFWPFIAGAKLVMAEPEAHRDPLVMQQFFARYGVTTTHFVPSMLAAFVASLTPETARESCASLKRVFCSGEALPADLCREWEQLTHAPLHNLYGPTEAAVDVSWYPAWGEDLAAVTGNSVPIGYPVWNTGLRILDAMMRPVPFGVAGDLYLTGIQLAQGYLGRPDLTASRFIADPFSVGERMYRTGDVARWLENGAVEYLGRSDDQLKIRGQRIELGEIDRVMQQLPDVEHAVAHACVFNQAAATGGDARQLVGYLVSQSGLPLDTTVLRERLREKLPAHMVPTVLLQLAELPLSANGKLDRKALPMPQLTSRVSGRAPRTGTETTIAQSFAALLDCEVNDVEADFFALGGHSLLAMKLAAQLSRIFERQVTPGQIMVASTVEQLSALLESNDDEQSQRLGFETLLPLRESHGPTLFCFHPASGFAWQFSVLSRYLSPQWSIMGIQSPRPDGPMQTAENLDSVCEHHLATLLSQQPHGPYYLLGYSLGGTLAQGIAARLHARGETVAFLGLLDTWPPETQNWQEKEANGLDPAVLAEIEREREAFLAAQQGNASEALFNAIEGNYADAVRLLTTAHSVPFAGHATLFVAERTLVPGVSPERSWSSWISSLDVYRYDCAHVDIISPTAFEAIGPVINTLINKSV

SEQ ID NO: 93042 - protein, 217 aa, Citrobacter koseri
  misc_feature (1)..(217): tr|A0A3R9C0L2|A0A3R9C0L2_CITKO Enterobactin synthase su bunit EntD OS=Citrobacter koseri OX=545 GN=entD PE=3 SV =1
MQTTYTALSFSRHKLHLIGFDIDSFHEHDLLWLPHHAQLLPAGRKRQAEHLAGRLAAFHALTEYGHKTVPAIGDKRQPLWPEGLFGSISHSAATALAVVSLTPVGVDIEAIFTPQTAAELTNSIVDNDEQRVLQHSSLPFPLALTLAFSAKESVYKAFSDRAATLPGFASARIVSVTKTHLTMQMTSAFSPQLADCTVDISWREYDGQVITLCASAL

SEQ ID NO: 93043 - protein, 1296 aa, Citrobacter portucalensis
  misc_feature (1)..(1296): tr|A0A4P7UP48|A0A4P7UP48_9ENTR Enterobactin non-ribosom al peptide synthetase EntF OS=Citrobacter portucalensis OX=1639133 GN=entF PE=3 SV=1
MTQRLPLVAAQPGIWMAEKLSTLPSAWSVAHYVELTGELDASLLAKAVVAGLEQADTLRMRFSEDNGEIWQWVDSALAFAQPEIIDLREKSNPHEAARALMQADLQQDIRADGNKPLVFHLLIQVGEKRWYWYQRYHHLLVDGFSFPAITRQIAAIYRAWLHGEPTPDSPFTPFAEVVEEYQQYRQSDAWQRDGAFWSEQRKQLPPPASLSNNPLPGRSASADIIRMKLTAPEGAFRRLAARMPDVQRADLALALVALWLGRLCSRMDYAAGFIFMRRMGSAALTSTGPVLNVLPFGVRLDAAESLPVLAQRLAGQLKKMRRHQRYDAEQIVRDSGRAAGAEPLFGPVLNVKIFDYQLNIPGVQAQTHTLATGPVNDLELALFPDENGGLSIEILANKQRYDAVTLAQHASRLIGLIEQFADNPALCCGDAGMLLPTEHERLAKINDTTVEIPSTTLSGLVAQQADKTPDAPALADARYQFSYREMHQQVVALASLLRARGVKPGDSVAVALPRSVFLTLALHGIVEAGAAWLPLDTGYPDDRLRMMLEDAKPKLLIATNEQLARFSDIPGLESLCYDSPLPAEDAAPLALSQPNHTAYIIFTSGSTGRPKGVMVGQTAIVNRLLWMQNHYPLTADDVVAQKTPCSFDVSVWEFFWPFIAGAKLVMAEPEAHRDPLAMQQFFAQYGVTTTHFVPSMLAAFVASLTPETARESCASLKRVFCSGEALPADLCREWEQLTHAPLHNLYGPTEAAVDVSWYPAWGEDLAAVTGNSVPIGYPVWNTGLRILDAMMRPVPFGVAGDLYLTGIQLAQGYLGRPDLTASRFIADPFNVGERMYRTGDVARWLENGAVEYLGRSDDQLKIRGQRIELGEIDRVMQQLPDVEHAVAHACVFNQAAATGGDARQLVGYLVSQSGLPLDTSALREKLREKLPAHMVPTVLLQLAELPLSANGKLDRKALPMPQLTSRTSGRAPRAGTETTIAQSFAALLGCEVNDVAADFFALGGHSLLAMKLAAQLSRVFERQVTPGQIMVASTVEQLSALLESTDDEQSQRLGFEALLPLRESHGPTLFCFHPASGFAWQFSVLSRYLSPQWSIIGIQSPRPDGPMQTAENLDAVCEHHLTTLLSQQPHGPYYLLGYSLGGTLAQGIAARLHARGETVAFLGLLDTWPPETQNWQEKEANGLDPAVLAEIEREREAFLAAQQGNASEALFNAIEGNYADAVRLLTTAHSVPFAGHATLFVAERTLVPGVSPERSWSPWISSLDVYRQDCAHVDIISPASFEAIGPVINALINKSV

SEQ ID NO: 93044 - protein, 1295 aa, Citrobacter rodentium
  misc_feature (1)..(1295): tr|A0A482PUP4|A0A482PUP4_CITRO Enterobactin non-ribosom al peptide synthetase EntF OS=Citrobacter rodentium OX= 67825 GN=entF PE=4 SV=1
MSRRLPLVAAQPGIWMAEKLSTLPSAWSVAHYVALNGELDAPLLARAIVTGMQQADTLRMRFSEDNGDVWQWVDESLTFAEPPITDLRHAADPHQAALAVMQADLQQNLRADSGKPLAFQQLIQVADDRWYWYQRYHHLLVDGFSFPAITRQIAMIYRAWQRGDATPASPFTPFADVVDEYQQYRQSDAWQRDGAFWAQQRSELPPPASLSSAPLPGRAATADILRLKLNAPEGAFRRLSAHFPDAQRADLALALVTLWLGRVCNRMEYAAGFIFMRRMGSAALTASGPVLNVLPLAVRIDAAESLAELAQRLSAQLKKMRRHQRYDAEQIVRDGGRAAGEEPLFGPVLNVKVFDYQLDLPGIRAQTHTLATGPVNDLELALFPDEEGGLSIELLANRQRYDEATLTKHAARLTAMIEQFAENPALRCGDAEMLLTSEYQQFAWINATAVEIPATTLSALVAQQASRTPDAPALADSLYQFSYREMREQVVALATLLRQRGVKPGDSVAVALPRSVFLTLALHGIVEAGAAWLPLDTGYPDDRLRMMLEDAGPKLLITTEEQLPRFSDIPGLESLCYAEPLAGGDTAPLGLSQPQHTAYIIFTSGSTGRPKGVMVGQTAIVNRLLWMQNHYRLTADDVVAQKTPCSFDVSVWEFFWPFIAGAKLVMAAPEAHRDPFAMQHFFSRYGVTTTHFVPSMLAAFVAALTPESARQSCATLKHVFCSGEALPADLCREWEQLTHAPLHNLYGPTEAAVDVSWYPASGEALAAVNGSSVPIGFPVWNTGLRILDAMMHPVPVGVAGDLYLTGIQLAQGYLGRPDLTASRFIADPFAPGERMYRTGDVARWLDNGAVEYLGRSDDQLKIRGQRIELGEIDRVMQALPDVEQAVAHACVFNQAAATGGDARQLVGYLVSRSGLPLNIPALQAQLRDKLPPHMVPVVLLQLAQLPLSANGKLDRKALPMPELTRRVKGRAPRPGAESRVAQAFSALLGCEVDDVEADFFALGGHSLLAMKLAAQLSRDCARQVTPGQVMVASTVAQLAALLAADDDAQSRRLGFETLLPLRKSDGPTLFCFHPASGFAWQFSVLSRYLSPQWSITGIQSPRPHGPMQTAADLDAVCERHLTTLLAQQPHGPYYLLGYSLGGTLAQGIAARLRARGETVAFLGLLDTWPPETQNWSEKEANGLDPEVLAEIDRERQAFLAARQGNTSDELFGIIEGNYADAVRLLTTAHSVPFDGRATLFVAERTLPEGVSPEKSWAPWIAELEVYRQDCAHVDIISPAAFESIGPIVARKLNGG

SEQ ID NO: 93045 - protein, 1296 aa, Citrobacter sp.
  misc_feature (1)..(1296): tr|A0A4Y5ZDV8|A0A4Y5ZDV8_9ENTR Enterobactin non-ribosom al peptide synthetase EntF OS=Citrobacter sp. CF971 OX= 2566012 GN=entF PE=3 SV=1
MTQRLPLVAAQPGIWMAEKLSTLPSAWSVAHYVELTGELDALLLAKAVVAGLEQADTLRMQFSEDNGEVWQWVDPALTFAQPEIIDLREKSNPHEAARALMQADLQQDIRADGNKPLVFHQLLQVGDKRWYWYQRYHHLLVDGFSFPAITRQIAAIYRAWLDGESTPDSPFTPFAEVVEEYQQYRQSDAWQRDGAFWREQRKQLPPPASLSNNPLPGRSASADIIRMKLTAPEGAFRRLAARMPDVQRADLALALVALWLGRLCSRMDYAAGFIFMRRMGSAALTSTGPVLNVLPFGVRLDAAESLPALAQRLAGQLKKMRRHQRYDAEQIVRDSGRAAGAEPLFGPVLNVKIFDYHLNIPGVQAQTHTLATGPVNDLELALFPDENGGLSIEILANKQRYDAETLAQHASRLIGLIEQFADNPSLCCGDAGMLLPTEHERLAKINDTTVEIPFTTLSALVTQQADKTPDAPALADARYQFSYREMRQQVVALASLLRERGVRPGDSVAVALPRSVFLTLALHGIVEAGAAWLPLDTGYPDDRLRMMLEDAKPKLLIATEGQLARFSDIPGLESLCYDSPLPAEDAAPLALSQPNHTAYIIFTSGSTGRPKGVMVGQTAIVNRLLWMQNHYPLTADDVVAQKTPCSFDVSVWEFFWPFIAGAKLVMAEPEAHRDPLAMQQFFARYGVTTTHFVPSMLAAFVASLTPETARESCASLKRVFCSGEALPADLCREWEQLTHAPLHNLYGPTEAAVDVSWYPAWGEDLAAVTGNSVPIGYPVWNTGLRILDAMMRPVPFGVAGDLYLTGIQLAQGYLGRPDLTASRFIADPFNVDERMYRTGDVARWLENGAVEYLGRSDDQLKIRGQRIELGEIDRVMQQLPDVEHAVAHACVFNQAAATGGDARQLVGYLVSQSGLPLDTTVLRERLREKLPAHMVPTVLLQLAELPLSANGKLDRKALPMPQLMSRVSGRAPRTGTETTIAQSFAALLDCEVNDVEADFFALGGHSLLAMKLAAQLSRIFERQVTPGQIMVASTVEQLSALLESNDDEQSQRLGFETLLPLRESYGPTLFCFHPASGFAWQFSVLSRYLSPQWSIMGIQSPRPDGPMQTAENLDSVCEHHLATLLSQQPHGPYYLLGYSLGGTLAQGIAARLHARGETVAFLGLLDTWPPETQNWQEKEANGLDPAVLAEIEREREAFLAAQQGNASEALFNAIEGNYADAVRLLTTAHSVPFAGHATLFVAERTLAPGVSPERSWSSWISSLDVYRYDCAHVDIISPTAFEAIGPVINTLINKSV

SEQ ID NO: 93046 - protein, 225 aa, Citrobacter sp.
  misc_feature (1)..(225): tr|A0A4P6WL28|A0A4P6WL28_9ENTR Enterobactin synthase su bunit EntD OS=Citrobacter sp. LY-1 OX=2546350 GN=entD P E=3 SV=1
MYTTHTPLTFADHTLHIVEFDPDSFHEHDLLWLPHHTQLQPSGRKRKAEHLAGRIAAVHALREYGIKAVPGIGGQRQPLWPQTLFGSISHSASTALAVVSTHPVGLDIEAIFTPQTAVELTDGIIDNRERSILHHAGLPFPLALTLAFSAKESLYKTFSEHTTALPGFASAKVNALTPTQITLQIQPLFSQSLAGQEINVRWYQRDENVITFCMSSTPCPRSFSV

SEQ ID NO: 93047 - protein, 217 aa, Citrobacter sp.
  misc_feature (1)..(217): tr|A0A4V6BLT2|A0A4V6BLT2_9ENTR Enterobactin synthase su bunit EntD OS=Citrobacter sp. wls830 OX=2576411 GN=entD PE=3 SV=1
MHTTHTPLTFADHTLHIVEFDPASFHEQELLWLPHHAQLLSNGRKRNAEHLAGRIAAVYALREFGLKTVPGIGAQRQPLWPRNLFGSISHSASTALAVVSTRPVGVDIETIFPPPTAVELAESIVDNHERQIMPHANLPFPLALTLAFSAKESLYKTFSEHTTALPGFASAKVTALTPTQITLRILPLFSQSLAGQEINVRWFQRDRQVITLCDVIF

SEQ ID NO: 93048 - protein, 220 aa, Citrobacter sp.
  misc_feature (1)..(220): tr|A0A4U6DBR4|A0A4U6DBR4_9ENTR Enterobactin synthase su bunit EntD OS=Citrobacter sp. wls831 OX=2576410 GN=entD PE=3 SV=1
MHTTHIPLPFADHTLHIVEFDPDTFHEHDLLWLPHHTQLHSSGRKRKAEHLAGRIAAVHALREFGHKTVPGIGVQRQPLWPQDLFGSISHSATTALAVVSTHPIGLDIEAIFTPQTAVELADGIIDNHEHQILQHTCLPFPLALTLVFSAKESLYKAFSNQASGLPGFTSAKITALTTQQLTLQIMPSFSANLGNQEVNVHWFQRDKNIVTLFPFSPSGS

SEQ ID NO: 93049 - protein, 1296 aa, Citrobacter werkmanii
  misc_feature (1)..(1296): tr|A0A4Q4BJX5|A0A4Q4BJX5_9ENTR Enterobactin non-ribosom al peptide synthetase EntF OS=Citrobacter werkmanii OX= 67827 GN=entF PE=4 SV=1
MTQRLPLVAAQPGIWMAEKLSTLPSAWSVAHYVELTGELNAPLLAKAIVAGLEQADTLRMRFSEDNGEVWQWVDPALTFAEPEIFDLREKSHPHEAARALMQADLQQDLRADGHKPLVFHQLIQVGDNRWYWYQRYHHLLVDGFSFPAITRQIAAIYCAWQSGEPTPDSPFTPFAEVVEEYQQYRQSDAWQRDATFWTEQRKQLPPPASLSNKPLPGRSASADIIRLKLTAPEGAFRQLAARMPDVQRADLALALVALWLGRLCSRMDYAAGFIFMRRMGSAALTSTGPVLNVLPFGVRLDAAESLPALAQRLAGQLKKMRRHQRYDAEQIVRDSGRAAGTEPLFGPVLNVKIFDYQLNIPGVQAQTHTLATGPVNDLELALFPDENGGLSIEILANKQRYDAATLAQHASRLTALIEQFADNPALCCGEAGMLLPAEYEQLAKINDTTVEIPATTLSALVAQQADKTPDAPALADARYQFSYREMRQQVVALAHLLRARGVQPGDSVAVALPRSVFLTLALHGIVEAGAAWLPLDTGYPDDRLRMMLEDAKPKLVIATDDQLARFGDIPGLESLCYNAPLSVGDTAPLALSQPHHTAYIIFTSGSTGRPKGVMVGQTAIVNRLLWMQNHYPLTAEDVVAQKTPCSFDVSVWEFFWPFIAGAKLVMAEPEAHRDPLAMQQFFAQYGVTTTHFVPSMLAAFIASLTPETAQKSCASLKQVFCSGEALPADLCREWEQLTHAPLHNLYGPTEAAVDVSWYPAWGEALAAVTGNSVPIGYPVWNTGLRILDAMMRPVPFGVAGDLYLTGIQLAQGYLGRADLTASRFIADPFNAGERMYRTGDVARWLENGAVEYLGRSDDQLKIRGQRIELGEIDRVMQQLPDVEHAVAHACVFNQAAATGGDARQLVGYLVSQSGLPLDTSALRESLREKLPAHMVPTVLLQLAALPLSANGKLDRKALPMPQLTSRTTGRAPRPGIETTIAHSFAALLDCEINDVEADFFALGGHSLLAMKLAAQLSRMFERLVTPGQIMVASTVKQLSALLESDDDEQSQHLGFETLLPLRESHGPTLFCFHPASGFAWQFSVLSRYLSPQWSITGIQSPRPDGPMRKAENLDAVCDHHLATLLNQQPHGPYYLLGYSLGGTLAQGIAARLHARGEDVAFLGLLDTWPPETQNWQEKEANGLDPAVLAEIEREREAFLAAQQGNASDALFNAIEGNYVDAVRLLTTAHSVPFAGHATLFVAERTLPQDVSPERSWSPWISSLDVYRQDCAHVDIISPTAFETIGPVINALINQSA

SEQ ID NO: 93050 - protein, 220 aa, Citrobacter youngae
  misc_feature (1)..(220): tr|A0A549UKS0|A0A549UKS0_9ENTR Enterobactin synthase su bunit EntD OS=Citrobacter youngae OX=133448 GN=entD PE= 3 SV=1
MRTTHTSLPFADYSLQIIEFDPNSFHEHDLLWLPHHAQLTAGARKRKAEHLAGRIAAIHALREYGIKTVPGIGEQRQPLWPHGLFGSISHSATTALAVVSRHPVGLDIEAIFSPQVAAELADSIIDNTERKVLLHASLPFPLALTLAFSAKESLYKAFSTQASGLPGFASAKITALTTQHITLQIMPSFSANLGNQDVNVRWFQRGNNIITLCPASPSGS

SEQ ID NO: 93051 - protein, 234 aa, Cronobacter sakazakii
  misc_feature (1)..(234): tr|A0A5D1BG72|A0A5D1BG72_CROSK Enterobactin synthase su bunit EntD OS=Cronobacter sakazakii OX=28141 GN=entD PE =3 SV=1
MTTAGSDARLFPMQTTLTSLTFAGQLLWRVDFSPDTFTPADLLWLPHHAMLANAVAQRQAEHLAGRIAAVAALKAAGAPFSPPGIGAHREPRWPAGFTGSITHTGHRAWAVVIATLGGIGIDVENLMNAQTARELAPGIIDTQERALLTRTPLPFASALTLAFSAKESLFKALFPQVGDWFGFECAKVVALDDHQLTLRLACPLGPFAQTQCFTLHWRQEAQQILTLVNAPGSG

SEQ ID NO: 93052 - protein, 291 aa, Dickeya dianthicola
  misc_feature (1)..(291): tr|A0A385XZS3|A0A385XZS3_9GAMM Enterobactin synthase co mponent B OS=Dickeya dianthicola OX=204039 GN=entB PE=4 SV=1
MAIPKLNAYPLPGVEHLPVNKVNWPVDAARAALLIHDMQNYFLNFWGEDSLLTEQLVANVARIRQACRQQGIPVFYTAQPNQQSDADRALLNDMWGPGLNRHPDQQQIAAALTPDANDTVLVKWRYSAFHRSDLEQRLNAAGRDQLIICGVYAHIGCLTTATDAFMRDIKPFMVADALADFSQEEHLMALRYTAGRCGRVLTSEQLLDALAPQTDDGLARLRAELLPLLDDDDDIGDDDNLLDYGLDSVRIMSLVTRWRQQGHDLDFVALVKNPTLRHWHQLLNRRQREEA

SEQ ID NO: 93053 - protein, 215 aa, Enterobacter asburiae
  misc_feature (1)..(215): tr|A0A5A9A1A3|A0A5A9A1A3_ENTAS Enterobactin synthase su bunit EntD OS=Enterobacter asburiae OX=61645 GN=entD PE =3 SV=1
MHTTHRTFILAGHTVHHVTFDPTTFTDADLLWLPHHAELSKAGRKRKAEHLAGRIAAAHALPEHTVPGIGPSGEPLWPEGVSGSITHSGTQAIAVAVRYPDALVGIDCEAILPDREAREIQDGIINAQEAMCLTRSGYPFALALTLAFSAKESLFKAFFPQVKTFMGFEWARVTELTEKTITLALSHPAGDYPEGKRFTLIWQNNDTSVWTLLKA

SEQ ID NO: 93054 - protein, 218 aa, Enterobacter cloacae
  misc_feature (1)..(218): tr|A0A4V1AFC6|A0A4V1AFC6_9ENTR Enterobactin synthase su bunit EntD OS=Enterobacter cloacae complex sp. OX=20279 19 GN=entD PE=3 SV=1
MRTTHTTFILAGHTVHHVTFDPTTFTDADLLWLPHHAELSNAGRKRKAEHLAGRTAAAHALSAINERVIPGIGPSGEPLWPEGVSGSITHSGTQAMAVVVSHPDALVGIDCEAILPDREAREIQDGIIDAQEAMCLTHSGYPFALALTLTFSAKESLFKAFFPQVKTFMGFEWARVTELTEKTITLALSHPAGDYPEGKCFPLIWQNNDTSVWTLLKA

SEQ ID NO: 93055 - protein, 1285 aa, Enterobacter cloacae
  misc_feature (1)..(1285): tr|A0A4Q4A2R7|A0A4Q4A2R7_ENTCL Enterobactin non-ribosom al peptide synthetase EntF OS=Enterobacter cloacae OX=5 50 GN=entF PE=4 SV=1
MNRLPLVAAQPGIWMAEQLSSLPNAWSVAHYTELKGNIDAPLLAKAIAEGMMQADTLRTRFAEDNGEVWQWVDETLILPEPSIVRVDSHDAAVALMEADLSQDLRVDSGQPLAFHQLIQVGDNRWYWYQRYHHLVVDGFSFPAITRQIAAIYAAWKKGEPTPASPFTPFAEVVDEYQRYRDSEAWQRDGAFWAGQRKQLPPPVSLSSAPLPGRAATTDILRLKIAMDARAFSQLAQAAGQAQRTDLALALAALWLGRLTGRLDYAAGFIFMRRMGSAALTATGPVLNVLPLAVNINPLESLPELALRLANQLKKMRRHQRYDAEQIVRDSGRAAGDEPLFGPVLNVKVFDYQLDIDGVEAITHTLATGPVNDLELALFPDEQGGLSIEILANRQRYDDATLRRHVSRLNAMLTQFAANPDLRCGDVETVSEQEYARLARINDTGLALPSTTLADLVAEQANKTPDAPALADAHIELNYRQMREQVVALATLLRARGVKPGDSVAVALPRSVFLTLALHGIVEAGAAWLPLDTGYPDDRLRMMLEDAKPSLLITTDAQLPRFNDLPIPSLSYNMLLPTTDAEPLRLAKPEQTAYIIFTSGSTGRPKGVMVGHTAIVNRLKWMQDHYPLAADDVVAQKTPCSFDVSVWEFWWPFIAGAKLVMAEPDAHRDPQAMQSFFAEYGVTTTHFVPSMLAAFVASLTPENVDCCRTLKQVFCSGEALPTALCREWEQLTHVPLHNLYGPTEAAVDVSWYPAYGPELAAVEGNSVPIGFPVWNTGLRILDAMMRPVPFGVSGDLYLTGIQLAQGYLGRPDLTASRFIADPFAPGERMYRTGDVARWLDNGAVEYLGRSDDQLKIRGQRIELGEIDRAMLSLPDVAQAVAHACVFNQAAATGGDARQLVGYVVSESGLPLDRDALLDSLRAQLPPHMVPVVLLQISALPLSANGKLDRKALPLPELTSKTSGRAPETQTEAAVAQAFSALLGCEVNDIDADFFALGGHSLLAMRLAAQLGRAFSRKVMPGQIMVASTVGKLSALLDSQLSDEQAQRLGYETLLPLRESNGPTLFCFHPASGFAWQFSVLARYLSPRWSIVGIQSPRPNGPMQQCADLDGVIEHHLKTLRKQQPQGPYYLFGYSLGGTLAQGIAARLREQGEAVAFLGLLDTWPPETQNWAEKEANGLDPEVLAEIERERQAFIAAQQGQGSSELFNTIEGNYADAVRLLTTAHSSRFDGKATLFVAERTRTMDPHTAWAPWVGELEVYSQDCAHVDIISPQAFEKIGPVLKEILE

SEQ ID NO: 93056 - protein, 259 aa, Enterobacter hormaechei
  misc_feature (1)..(259): tr|A0A4S2WYY5|A0A4S2WYY5_9ENTR Enterobactin synthase su bunit EntD OS=Enterobacter hormaechei OX=158836 GN=entD PE=3 SV=1
MHTTHSTFSLAGHTLHRITFDPTTFTDADLLWLPHHAQLANAGRKRKADHLAGRIAAAHALPDYTMPAIGPSGEPLWPQDISGSITHSGTQAIAVVTQYPVLIGIDCETILSENEAREIKDGIIDTQEEPVLSRLGYPFALALTLVFSAKESLFKALFPQVQAWMGFDCARVTKLDDKTLTLALTCQLADFQEGTAFPLHWQQHGEQVITLLSHAPATSLHAGHHKRHDKHHREQDHNGRRRRAVEIKRGIHAAYRHQR

SEQ ID NO: 93057 - protein, 1285 aa, Enterobacter kobei
  misc_feature (1)..(1285): tr|A0A5A9B9Z7|A0A5A9B9Z7_9ENTR Enterobactin non-ribosom al peptide synthetase EntF OS=Enterobacter kobei OX=208 224 GN=entF PE=3 SV=1
MSRLPLVAAQPGIWMAEQLSALPNAWSVAHYTELKGDIDAPLLAKAIAEGMMQADTLRMRFAEDNGEVWQWVDETVMLPEPSIVRVDSHDAAVALMEADLNQNLRVDSGQPLAFHLLIQVGEERWYWYQRYHHLVVDGFSFPAITRQITAIYAAWKKGDPTPSSPFSPFAEVVEEYQRYRESEAYARDGDFWAAQRRKLPPPVSLSSVPLPGRAATTDILRLKIVADSSAFSQLAQAAGQAQRTDLALALVALWLGRLTGRLDYAAGFIFMRRMGSVALTATGPVLNVLPLAVNIDPQESLPGLALRLASQLKKMRRHQRYDAEQILRDSGKAAGDEALFGPVLNVKVFDYQLELDGVEAITHTLATGPVNDLELALFPDEQGGLSIEILASKQRYDETTLKGHVARLNAMLVQFAANPDLRCGEVETVSEQEYAQLARINDTGLALPSTTLAELVAEQASRTPDAPALADAHIELNYRQMREQVVALANLLRARGVKPGDSVAVALPRSVFLTLALHGIVEAGAAWLPLDTGYPDDRLRMMLEDAKPSLLITTDEQLPRFSELPIASFSYNMLLPAAGTQPLRVAKPEQTAYIIFTSGSTGRPKGVMVGHTAIVNRLKWMQNHYPLTANDVVAQKTPCSFDVSVWEFWWPFIAGAKLVMAEPDAHRDPQAMQSFFARYGVTTTHFVPSMLAAFVASLTPENVDCCRTLKQVFCSGEALPTGLCREWEQLTRAPLHNLYGPTEAAVDVSWYPAFGPELAAVEGNSVPIGFPVWNTGLRILDALMRPVPFGVAGDLYLTGIQLAQGYLGRPDLTASRFIADPFAPGERMYRTGDVARWLDNGAVEYLGRSDDQLKIRGQRIELGEIDRAMLSLPDVAQAVAHACVFNQAAATGGDARQLVGYVVSESGLPLDRDALLESLKAQLPPHMVPVVMLQLSALPLSANGKLDRKALPLPELTSKTTGRAPETDTEIGVAQAFAALLGCEVNDIEADFFALGGHSLLAMRLAAQLSSTFARKVTPGQIMVASTVSKLSALLDLKMNDEQAQRLGYEAVLPLRESHGPTLFCFHPASGFAWQFSVLARYLSPRWSITGIQSPRPEGPMQQCADLDGVIDHHLNTLRKQQPQGPYYLFGYSLGGTLAQAIAARLRAQGEAVAFLGLLDTWPPETQNWAEKEANGLDPAALAEIERERQAFIAAQQGQGSSELFGAIEGNYADAVRLLTTAHSARFDGKATLFVAERTRTMDPQIAWAPWVAELEVHSQDCAHVDIISPQAFEKIGPVLKGILG

SEQ ID NO: 93058 - protein, 228 aa, Enterobacter ludwigii
  misc_feature (1)..(228): tr|A0A5A9AT43|A0A5A9AT43_9ENTR Enterobactin synthase su bunit EntD OS=Enterobacter ludwigii OX=299767 GN=entD P E=3 SV=1
MRTTHSTFRLAGTTVHQITFDPTTFTDADLLWLPHHNALAHAAPKRKAEHLAGRLAAAHALQEYGSTAIPAIGSSGEPLWPDGMTGSISHTASRALAVVTPHGLTGIDGEIILADDEAVEIKDGIIGPAEDSLLRHTGLPFAQALTLTFSAKESLFKALFSQVNAMMGFDCARVTALDENTLTLALTRPLAGFSQDDAFTLFWLRDGNTQITLLPPFPAASRKSSSRR

SEQ ID NO: 93059 - protein, 218 aa, Enterobacter sp.; identical to SEQ ID NO: 93054
  misc_feature (1)..(218): tr|A0A4S3EN25|A0A4S3EN25_9ENTR Enterobactin synthase su bunit EntD OS=Enterobacter sp. AD2-3 OX=2547834 GN=entD PE=3 SV=1

SEQ ID NO: 93060 - protein, 221 aa, Enterobacter sp.
  misc_feature (1)..(221): tr|A0A5J6W9A6|A0A5J6W9A6_9ENTR Enterobactin synthase su bunit EntD OS=Enterobacter sp. E76 OX=2596949 GN=entD P E=4 SV=1
MNTELTTLALNQRTLFCLRFAPDSFAAQDLLWLPHHPMLARAVMSRKAEHLAGRIAAVHALRHAGSPATPPGIGAHREPLWPAGFTGSITHAGNLALAAVKPTGERFSSLGIDYQPLLTANDAQKLADGVLSGDERARIQAASVPFHLALSLIFSAKESLFKALFPAVQNWFGFECAQAVALTSDTVTLELTCPLGPFIIGSRFTLGWLPFGDGIVTLADL

SEQ ID NO: 93061 - protein, 229 aa, Enterobacter sp.
  misc_feature (1)..(229): tr|A0A5C1CT74|A0A5C1CT74_9ENTR Enterobactin synthase su bunit EntD OS=Enterobacter sp. LU1 OX=1848517 GN=entD P E=3 SV=1
MHTTHSTFSLAGHTLHRITFDPATFTDADLLWLPHHAQLADAGRKRKADHLAGRIAAAHALPDHTMPAIGPSGEPLWPQGISGSITHSGTQAIAVVTQYPALIGIDCETILFENEAREIKDGIIDTQEEPVLSRQGYPFALALTLVFSAKESLFKALFPQVQAWMGFDCARVTKLDDKTLTLALTRQLAGFEEGTAFRLHWQQHGEQVITLLSHAPGDEPSRWSPQTSR

SEQ ID NO: 93062 - protein, 229 aa, Enterobacter sp.
  misc_feature (1)..(229): tr|A0A5D9BMA8|A0A5D9BMA8_9ENTR Enterobactin synthase su bunit EntD OS=Enterobacter sp. RVSM5a OX=2605743 GN=ent D PE=3 SV=1
MHTTHSTFSLAGHTLHRITFDPATFSDADLLWLPHHAQLADAGRKRKADHLAGRIAAAHALPDHTMPAIGPSGEPLWPQGISGSITHSGTQAIAVVTQYPALIGIDCETILFENEAREIKDGIIDTQEEPVLSRQGYPFALALTLVFSAKESLFKALFPQVQAWMGFDCARVTKLDDKTLTLALTRQLAGFEEGTAFRLHWQQHGEQVITLLSHAPGDEPSRWSPQTSR

SEQ ID NO: 93063 - protein, 1285 aa, Enterobacter sp.
  misc_feature (1)..(1285): tr|A0A4R0GAY0|A0A4R0GAY0_9ENTR Enterobactin non-ribosom al peptide synthetase EntF OS=Enterobacter sp. WCHEs120 002 OX=2529381 GN=entF PE=4 SV=1
MNRLPLVAAQPGIWMAEQLSTLPNAWSVAHYTELNGDIDAPLLAKAVAAGMMQADTLRTRFAEDNGEVWQWVDASMMLPEPSIVRVDSHAAAAALMEADLNQNLRVDSGQPLAFHQLIQVGENRWYWYQRYHHLVVDGFSFPAITRQIAAIYRAWKNGESTPESPFTPFSEVVEEYQRYRDSEAYARDGAFWAEQRRQLPSPVSLSAAPLPGRAATTDILRLKIAMDGRAFSQLAQAAGQAQRTDLALALVALWLGRLTGRLDYAAGFIFMRRMGSAALTATGPVLNVLPLAVNINPQESLPALALRLANQLKKMRRHQRYDAEQIVRDGGRAAGEDALFGPVLNVKVFDYQLDIDGVEAITHTLATGPVNDLELALFPDEQGGLSIEILANKQRYDEATLSRHVARLNAMLLQFAANPDLRCGEVETVSEQEYAQLARINDTGLALPSTTLAELVAEQASKTPDAPALADAHVELSYRQMREQVVALANLLRARGVKPGDSVAVALPRSVFLTLALHGIVEAGAAWLPLDTGYPDDRLRMMLEDAKPSLLITTDEQLPRFSDLPITAFSYNTLLPAAEAEPLRLATPEQTAYIIFTSGSTGRPKGVMVGHTAIVNRLKWMQDHYPLDATDVVAQKTPCSFDVSVWEFWWPFIAGAKLVMAEPDAHRDPQAMQSFFARYGVTTTHFVPSMLAAFVASLTPENAACCNTLKQVFCSGEALPTELCREWEELTHAPLHNLYGPTEAAVDVSWYPAFGPELAGVEGNSVPIGFPVWNTGLRILDAMMRPVPFGVAGDLYLTGIQLAQGYLGRPDLTASRFIADPFAPGERMYRTGDVARWLDNGAVEYLGRSDDQLKIRGQRIELGEIDRAMLSLPDVAQAVAHACVFNQAAATGGDARQLVGYVVSESGLPLDRDALLESLKAQLPPHMVPVVLLQISALPLSANGKLDRKALPLPELTSKTTGRAPETETESAVAQAFSALLGCEVNDIEADFFALGGHSLLAMRLAAQLSRAFDRKVTPGQIMVASTVSKLSALLDSQMSDEQAQRLGYETLLPLREGNGPTLFCFHPASGFAWQFSVLARYLSPRWSITGIQSPRPDGPMQQRAYLDGVIEHHLATLRKQQPQGPYYLFGYSLGGTLAQAIAARLRELGEEVAFLGLLDTWPPETQNWAEKEANGLDPEVLAEIERERQAFIAAQQGQGSSELFNAIEGNYADAVRLLTTAHSARFDGKATLFVAERTRTMDPQVAWSPWVAELEVYSQDCAHVDIISPQAFEKIGPVLKEILG

SEQ ID NO: 93064 - protein, 1285 aa, Enterobacter sp.
  misc_feature (1)..(1285): tr|A0A4R0G1B0|A0A4R0G1B0_9ENTR Enterobactin non-ribosom al peptide synthetase EntF OS=Enterobacter sp. WCHEs120 003 OX=2529382 GN=entF PE=4 SV=1
MNRLPLVAAQPGIWMAEQLSSLPNAWSVAHYTELKGNIDAPLLAKAIAQGMMQADTLRTRFAEDNGEVWQWVDETLILPEPSIVRVDSHDAAVALMEADLSQDLRVDSGQPLAFHQLIQVGDNRWYWYQRYHHLVVDGFSFPAITRQIAAIYAAWKKGEPTPASPFTPFAEVVDEYQRYRDSEAWQRDGAFWAGQRKQLPPPVSLSSAPLPGRAATTDILRLKIAMDARAFSQLAQAAGQAQRTDLALALVALWLGRLTGRLDYAAGFIFMRRMGSAALTATGPVLNVLPLAVNINPLESLPELALRLANQLKKMRRHQRYDAEQIVRDSGRAAGDEPLFGPVLNVKVFDYQLDIDGVEAITHTLATGPVNDLELALFPDEQGGLSIEILANRQRYDDATLKRHVSRLNAMLTQFAANPDLRCGDVETVSEQEYARLARINDTGLALPSTTLADLVAEQANKTPDAPALADAHIELNYRQMREQVVALATLLRARGVKPGDSVAVALPRSVFLTLALHGIVEAGAAWLPLDTGYPDDRLRMMLEDAKPSLLITTDTQLPRFNDLPIPSLSYNMLLPTTDAEPLRLAKPEQTAYIIFTSGSTGRPKGVMVGHTAIVNRLKWMQDHYPLAADDVVAQKTPCSFDVSVWEFWWPFIAGAKLVMAEPDAHRDPQAMQSFFAEYGVTTTHFVPSMLAAFVASLTPENVDCCRTLKQVFCSGEALPTALCREWEQLTHVPLHNLYGPTEAAVDVSWYPAYGPELAAVEGNSVPIGFPVWNTGLRILDAMMRPVPFGVAGDLYLTGIQLAQGYLGRPDLTASRFIADPFAPGERMYRTGDVARWLDNGAVEYLGRSDDQLKIRGQRIELGEIDRAMLSLPDVAQAVAHACVFNQAAATGGDARQLVGYVVSESGLPLDRDALLDSLRTQLPPHMVPVVLLQISALPLSANGKLDRKALPLPELTSKTSGRAPETQTEAVVAQAFSALLGCEVNDIDADFFALGGHSLLAMRLAAQLGRAFSRKVTPGQIMVASTVGKLSALLDSQLSDEQAQRLGYETLLPLRESNGPTLFCFHPASGFAWQFSVLARYLSPRWSIVGIQSPRPNGPMQQCADLDGVIEHHLKTLRKQQPQGPYYLFGYSLGGTLAQGIAARLREQGEAVAFLGLLDTWPPETQNWAEKEANGLDPEVLAEIERERQAFIAAQQGQGSSELFNTIEGNYADAVRLLTTAHSSRFDGKATLFVAERTRTMDPHTAWAPWVGELEVYSQDCAHVDIISPQAFEKIGPVLKEILE

SEQ ID NO: 93065 - protein, 206 aa, Enterococcus durans
  misc_feature (1)..(206): tr|A0A557ZLJ0|A0A557ZLJ0_9ENTE Enterobactin synthase su bunit EntD OS=Enterococcus durans OX=53345 GN=entD PE=3 SV=1
MKTTHTSLPFAGHTLHFVEFDPANFCEQDLLWLPHYAQLQHAGRKRKAEHLAGRIAAIYALREYGYKCVPAIGELRQPVWPAEVYGSISHCGATALAVVSRQPIGVDIEEIFSAQTATELTDNIITPAEHERLADCGLAFSLALTLAFSAKESAFKASEIQTDAGFLDYQIISWNKQQVIIHRENEMFAVHWQIKEKIVITLCQHD

SEQ ID NO: 93066 - protein, 1293 aa, Escherichia albertii
  misc_feature (1)..(1293): tr|A0A4Q9IUU4|A0A4Q9IUU4_9ESCH Enterobactin non-ribosom al peptide synthetase EntF OS=Escherichia albertii OX=2 08962 GN=entF PE=4 SV=1
MSQHLPLVAAQPGIWMAEKLSDLPSAWSVAHYVELTGDVDVPLLARAVVAGLAQADTLRMRFTEDNGEIWQWVDDALTFEQPEIIDLRTNIDPHGTALALMQADLQQNLRIDSGNQLVFHKLIQVEDNRWYWYQRYHHLLVDGFSFPAITRQIANIYCAWLRGEPTPVSPFTSFTDVVEEYQQYRESEAWQRDAAFWADQRRQLPPPASLSPAPLPGRSASADILRLKLEFTDGEFRQLAAQLPTVQRTDLALALAALWLGRLCNRMDYAAGFIFMRRMGSVALTATGPVLNVLPLGIHIEARETLPQLATRLAAQLKKMRRHQRYDAEQIVRDSGRAAGEEPLFGPVLNIKVFDYQLDIPGMRAQTHTLATGPVNDLELALFPDENGDLSIEILANKQRYDESTLIQHAERLKMLIAQFAATPALLCGDVDIMLPDEYEQLAQINATQVEIPETTLSALVAEQAAKTPDAPALADAHYQFSYREMREQVVALANLLRERGVKPGDSVAVALPRSVFLTLALHAIVEAGAAWLPLDTGYPDDRLKMMLEDARPSLLITTDEQLPRFRDIPNLTNLCYNAPLTPQGSAPLQLSQPYHTAYIIFTSGSTGRPKGVMVGQKAIVNRLLWMQNHYSLTGEDVVAQKTPCSFDVSVWEFFWPFIAGAKLVMAAPEAHRDPLAMQQFFAEYGVTTTHFVPSMLAAFVASLTPETARQCCATLKQVFCSGEALPTDLCREWQQLTNVPLHNLYGPTEAAVDVSWYPAFGAELAAVRGSSVPIGYPVWNTGLRILDAMMHPVPPGVAGDLYLTGIQLAQGYLGRPDLTASRFIADPFAPGERMYRTGDVARWLENGAVEYLGRSDDQLKIRGQRIELGEIDRVMQALPDVEQAVTHACVINQAAATGGDARQLVGYLVSQSGLPLDIPALQAQLRETLPPHMVPVVLLQLPQLPLSANGKLDRKALPLPELKAQTPGRAPKAGSETIIAGAFSSLLGCDVQDADADFFALGGHSLLAMKLAAQLSRQFARQVTPGQVMVASTVAKLATVIDGEEESAHRLGFETLLPLRESKGPTLFCFHPASGFAWQFSVLSRYLDPQWSIIGIQSPRPNGLMQTATNLDEVCEAHLATLLQQQPHGPYYLLGYSLGGSLALGIAARLRARGEQVAFLGLLDTWPPETQNWHEKEANGLDPEVLAEINREREAFLAAQQNYASTELFTTIEGNYADAVRLLTTAHSVPFDGKATLFVAERTVQEGVNPERVWAPWIAELDIYPQDCAHVDIISAVAFEKIGPIIRAALNK

SEQ ID NO: 93067 - protein, 536 aa, Escherichia coli
  misc_feature (1)..(536): sp|P10378|ENTE_ECOLI Enterobactin synthase component E OS=Escherichia coli (strain K12) OX=83333 GN=entE PE=1 SV=3
MSIPFTRWPEEFARRYREKGYWQDLPLTDILTRHAASDSIAVIDGERQLSYRELNQAADNLACSLRRQGIKPGETALVQLGNVAELYITFFALLKLGVAPVLALFSHQRSELNAYASQIEPALLIADRQHALFSGDDFLNTFVTEHSSIRVVQLLNDSGEHNLQDAINHPAEDFTATPSPADEVAYFQLSGGTTGTPKLIPRTHNDYYYSVRRSVEICQFTQQTRYLCAIPAAHNYAMSSPGSLGVFLAGGTVVLAADPSATLCFPLIEKHQVNVTALVPPAVSLWLQALIEGESRAQLASLKLLQVGGARLSATLAARIPAEIGCQLQQVFGMAEGLVNYTRLDDSAEKIIHTQGYPMCPDDEVWVADAEGNPLPQGEVGRLMTRGPYTFRGYYKSPQHNASAFDANGFYCSGDLISIDPEGYITVQGREKDQINRGGEKIAAEEIENLLLRHPAVIYAALVSMEDELMGEKSCAYLVVKEPLRAVQVRRFLREQGIAEFKLPDRVECVDSLPLTAVGKVDKKQLRQWLASRASA

SEQ ID NO: 93068 - protein, 206 aa, Escherichia coli
  misc_feature (1)..(206): tr|A0A5C2P790|A0A5C2P790_ECOLX Enterobactin synthase su bunit EntD OS=Escherichia coli O157 OX=1045010 GN=entD PE=3 SV=1
MKTTHTSLPFAGHTLHFVEFDPANFCEQDLLWLPHYAQLQHAGRKRKTEHLAGRIAAVYALREYGYKCVPAIGELRQPVWPAEVYGSISHCGATALAVVSRQPIGVDIEEIFSAQTATELTDNIITPAEHERLADCGLAFSLALTLAFSAKESAFKASEIQTDAGFLDYQIISWNKQQVIIHRENEMFAVHWQIKEKIVITLCQHD

SEQ ID NO: 93069 - protein, 536 aa, Escherichia coli
  misc_feature (1)..(536): sp|Q8XBV3|ENTE_ECO57 Enterobactin synthase component E OS=Escherichia coli O157:H7 OX=83334 GN=entE PE=3 SV=1
MSIPFTRWPEEFARRYREKGYWQDLPLTDILTRHAASDSIAVIDGERQLSYRELNQAADNLACSLRRQGIKPGETALVQLGNVAELYITFFALLKLGVAPVLALFSHQRSELNAYASQIEPALLIADRQHALFSGDDFLNTFVAEHSSIRVVQLLNDSGEHNLQDAINHPADGFTATPSPADEVVYFQLSGGTTGTPKLIPRTHNDYYYSVRRSVEICQFTQQTRYLCAIPAAHNYAMSSPGSLGVFLAGGTVVLAADPSATLCFPLIEKHQINVTALVPPAVSLWLQALTEGESRAQLASLKLLQVGGARLSATLAARIPAEIGCQLQQVFGMAEGLVNYTRLDDSAEKIIHTQGYPMCPDDEVWVADAEGNPLPQGEVGRLMTRGPYTFRGYYKSPQHNASAFDANGFYCSGDLISIDPEGYITVQGREKDQINRGGEKIAAEEIENLLLRHPAVIYAALVSMEDELMGEKSCAYLVVKEPLRAVQVRRFLREQGIAEFKLPDRVECVDSLPLTAVGKVDKKQLRQWLASRASA

SEQ ID NO: 93070 - protein, 206 aa, Escherichia sp.
  misc_feature (1)..(206): tr|A0A4P9DCM6|A0A4P9DCM6_9ESCH Enterobactin synthase su bunit EntD OS=Escherichia sp. E4742 OX=2044467 GN=entD PE=3 SV=1
MKTTHTALPFAGHTLHFVEFDPASFREQDLLWLPHYAQLQHAGRKRKTEHLAGRIAAVYALREYGYKCVPAIGELRQPVWPAEVYGSISHCGTTALAVVSRQPIGIDIEEIFSAQTAAELTDNIITHTEHEIITGCDLPFPMALTLAFSAKESAFKASKLQTEQGFLNYQIINWNKQQIIIRRDGEKFAVHWQIKEKIVITLCQHD

SEQ ID NO: 93071 - protein, 206 aa, Escherichia sp.
  misc_feature (1)..(206): tr|A0A4U6BWN7|A0A4U6BWN7_9ESCH Enterobactin synthase su bunit EntD OS=Escherichia sp. MR OX=2575922 GN=entD PE= 3 SV=1
MKTTHTSLPFAGHTLHFVEFDPVSFREQDLLWLPHYAQLQHAGRKRKAEHLAGRIAAVHALREFGFKYVPPVGERRQPLWPAGLYGSISHCQATALAVVSHQPMGIDIEEIFSAQAAEELKDSIMTPAEYELLVVSNLPFSVVLTLAFSAKESAFKASKLQTDQGFLDYQIVNWNKQRIIICWENEIFAVQWQIRGKQLITLCQHD

SEQ ID NO: 93072 - protein, 290 aa, Halomonas elongata
  misc_feature (1)..(290): tr|E1V3P2|E1V3P2_HALED Enterobactin synthase component EntB OS=Halomonas elongata (strain ATCC 33173 / DSM 258 1 / NBRC 15536 / NCIMB 2198 / 1H9) OX=768066 GN=entB PE =4 SV=1
MAIPHLPDYPLPTASDLPDNRAAWQAEASRSVLLIHDMQEHFIGFYGDDSLLVQRLIENIVRLRDWCHEQGIPVVYTAQPSDQPPSDRALLNDFWGPGLTEADPGRQAIVSALTPAEGETVLTKWRYSAFQRSELRTLMQEWGRDQLLITGVYAHIGCLATALEAFMVDIQAFMVGDAVADFSAEEHHMALNYVASRCGCVTALGDLVGDTSNQPSRDWLRHRVTRLIDGDVTAVAADENLLDYGLDSLQVMNLVAELKTLGVTLSFEELTRTPTLEAWWTLIEQKRLAA

SEQ ID NO: 93073 - protein, 1293 aa, Klebsiella aerogenes
  misc_feature (1)..(1293): tr|A0A5A8WWN0|A0A5A8WWN0_KLEAE Enterobactin non-ribosom al peptide synthetase EntF OS=Klebsiella aerogenes OX=5 48 GN=entF PE=4 SV=1
MSTRLPLVAAQPGIWMAERLSTLPGAWSVAHYVELRGNLDPALLSKAIVAGLKQADTLSMRFCEDNGEAWQWVDDAREFAEPQSVDLRQQADPHMSALTLMQSDLGQNLRVDSGNPLVCHQLMRVGDDCWYWYQRYHHLLVDGFSFPAITRQIAAIYRAWQRGEETPDSPFTPFAEVVEEYQRYYGSEAWQRDKAFWQAQRQALPSPASLSDAPLAGRATSSDIWRLKLEADPAVFSQLAASAPQCQRADLALAMTTLWLGRLCGRMDYAAGFIFMRRMGSAALTATGPVLNVLPLAVNIDAQETLAQLATRLSGQLKKMRRHQRYDAEQIVRDSGKAAGDEPLFGPVLNIKVFDYQLDIDDVQAQTHTLATGPVNDLELALFPDERGGLSLEILANKARYDEATLNRHVSRLTALLAQFAANPALRCGEAEMLSAEEGAQLALINNTAMPLPTTTLSALVAEQARKTPDAPALADASWRFSYREMRQQVVALANLLQQRGVKPGDSVAVALPRSVFLTLALHGIVEAGAAWLPLDTGYPDDRLRMMLEDAQPSLLITSDDQLARFSDIPGLTSLCYEQPLAAEDDTPLALSKPEHTAYIIFTSGSTGRPKGVMVGQTAIVNRLLWMQNHYPLTAADVVAQKTPCSFDVSVWEFWWPFMTGAQLVMAAPEAHRDPQAMQRFFAQYGVTTTHFVPSMLAAFVASLDSDNVSSCRTLKRVFCSGEALPTELCREWERLTGAPLHNLYGPTEAAVDVSWYPACGPELAAVTGTSVPIGWPVWNTGLRILDAAMRPVPPGVAGDLYLTGIQLAQGYMGRPDLTASRFIADPFAPGERMYRTGDVARWLDNGAVEYLGRSDDQLKIRGQRIELGEIDRVMAALPDVAQAVCHACVFNQAAATGGDARQLVGYLVSESGQPLDVAALKARLSEQLPPHMVPVVLIQLESFPLSANGKLDRKALPLPSLSSERSGRPPQSATEMAVAAAFSQLLGCEVNDIDADFFALGGHSLLAMRLAAQLSRELARQVTPGQVMVASTVGKLSALLASDLSDEQAQRLGFDALLPLRESDGPTLFCFHPASGFAWQFSVLARYLNPRWSITGIQSPRPTGPMASAANLDEVCEHHLRTLLAQQPHGPYYLFGYSLGGTLAQGIAARLRQRGEEVAFLGLLDTWPPETQNWAEKEANGLDPEVLAEIAREREAFLAAQQGQASGELFSAIEGNYADAVRLLTTAHSAKFDGKATLFVAEKTRQKGMDPQVAWGPWVGELEVFSQNCAHVEIISPQAFEAIGPVVREILG

SEQ ID NO: 93074 - protein, 1295 aa, Klebsiella grimontii
  misc_feature (1)..(1295): tr|A0A5A8XVX0|A0A5A8XVX0_9ENTR Enterobactin non-ribosom al peptide synthetase EntF OS=Klebsiella grimontii OX=2 058152 GN=entF PE=4 SV=1
MTTRLPLVAAQPGIWMAERLSTLPGAWSVAHYVELRGDIDPVLLGRAIITGLSQADTLSMRFCEDSGEAWQWVDERRVFAEPDYQDLRAASDPHAAALARMQADLGQNLRVDGGNPLVCHQLLRVGDNRWYWYQRYHHLLVDGFSFPAITRQIAAIYRAWQRGEETPASPFTPFAEVVEEYQRYYGSDAWQRDKAFWQAQRQALPSPASLSDAPLAGRATSSDIWRMKLEVDAGVFSRLAASAPQCQRADLALALTALWLGRLCSRTEYAAGFIFMRRMGSSALTATGPVLNVLPLAVTIDAGETLPELAARLAGQLKKMRRHQRYDAEQIVRDSGKAAGDEPLFGPVLNIKVFDYQLDIDGVQAITHTLATGPVNDLELALFPDEAGGLSLEVLANKQRYDKQTLGNHIARLSALLAQFADNPALRCGDVNMLSAAEAEQLQRVNATAVDLPLTTLSARVAEQAAKTPDAPALADGRWQFSYREMRQQVVALAEQLRARGVKPGDSVAVALPRSVFLTLALHGIVEAGAAWLPLDTGYPDDRLRMMLEDARPSLLITSEDQRARFSDIPGLESLCYQQPLAAADAAPLALSRPEHTAYIIFTSGSTGRPKGVMVGQTAIVNRLLWMQDHYPLTADDVVAQKTPCSFDVSVWEFWWPFIAGAQLVMAEPEAHRDPLAMQQFFARYGVTTTHFVPSMLAAFVASLNTENVASCHTLRRVFCSGEALPTALCREWEELTGAPLHNLYGPTEAAVDVSWYPACGPELAAVTGASVPIGWPVWNTGLRILDASMRPVPPGVAGDLYLTGIQLAQGYLGRPDLTASRFIADPYAPGERMYRTGDVARWLDNGAVEYLGRSDDQLKIRGQRIELGEIDRAMSALPDVAQAVAHACVFNQAAATGGDARQLVGYLVSESGLPLDTEALKARLGEQLPPHMVPVVLIQLPALPLSANGKLDRKALPLPTLSRVSRGRPPEPGVETTVASAFSQLLGCEVNDIDADFFALGGHSLLAMRLAATLGRELQRQVTPGQVMVASTVGKLSALLASDLSDEQAQRLGFDAILPLRASDGPTLFCFHPASGFAWQFSVLARYLSPRWSIVGIQSPRPHGPMATAADLDAVCEHHLQTLLSQQPHGPYYLLGYSLGGTLAQGIAARLRQRGEAVAFLGLLDTWPPETQNWAEKEANGLDPEVLAEIAREREAFLAAQQGQASGELFSVIEGNYADAVRLLTTAHSAKFDGKATLFVAEKTRQPGMEPQRVWGPWVGELEVFSQDCAHVDIISPQAFEAIGPVVREILGEG

SEQ ID NO: 93075 - protein, 207 aa, Klebsiella michiganensis
  misc_feature (1)..(207): tr|A0A443W849|A0A443W849_9ENTR Enterobactin synthase su bunit EntD OS=Klebsiella michiganensis OX=1134687 GN=en tD PE=3 SV=1
MQTQRSIIQLADRSLQRVDFDPLTFRPEDLLWLPHHARLSGCARKRQSEHLAGRIAAVYALREVGETEIPAIGDQRQPLWPAPWYGSISHCERSALAVVSAGPVGVDIERILSPALAAELESSIVNSAEKSLLDASGLPSALALTLAFSAKESAFKASPPEIQNGVGFSDFEVTYIKEGNLLLRLSAGEYRLQWIKAGDYVITLCAT

SEQ ID NO: 93076 - protein, 1293 aa, Klebsiella oxytoca
  misc_feature (1)..(1293): tr|A0A5F2FK21|A0A5F2FK21_KLEOX Enterobactin non-ribosom al peptide synthetase EntF OS=Klebsiella oxytoca OX=571 GN=entF PE=4 SV=1
MTTRLPLVAAQPGIWMAERLSTLPGAWSVAHYVELRGDIDPTLLGRAIVTGLSQADTLSMRFCEDNGEAWQWVDENRHFAEPDYRDLRTSHDPHAAALALMQADLGQNLRVDGGNPLVCHQLLRVGDKCWYWYQRYHHLLVDGFSFPAITRQIAAIYRAWQRGEETPASPFTPFAEVVEEYQRYYGSDAWQRDKQFWQAQRQALPAPASLSDAPLAGRATSTDIWRMKLEVDAGVFSRLAAGAPQCQRADLALALTALWLGRLCSRMDYAAGFIFMRRMGSAALTATGPVLNVLPLAVNIDARETLAELAMRLAGQLKKMRRHQRYDAEQIVRDSGRAAGDEPLFGPVLNIKVFDYQLDIDGVQAITHTLATGPVNDLELALFPDETGGLSLEVLANKQRYDEQTLRGHIARLSSLLTQFADNPTLPCGEANMLSAAENQRLAQVNATAVDLPLTTLSALVAAQAAKTPDAPALADGCWQFSYREMRQQVVALAERLRARGVKPGDSVAVALPRSVFLTLALHGIVEAGAAWLPLDTGYPDDRLRMMLEDARPSLLITSEDQLARFSDIPGLESLCYQQPLAAGESAPLALSQPEHTAYIIFTSGSTGRPKGVMVGQTAIVNRLLWMQDHYPLCAEDVVAQKTPCSFDVSVWEFWWPFIAGAQLVMAEPEAHRDPLAMQQFFARYGVTTTHFVPSMLAAFVASLEAENVDCCQTLRRVFCSGEALPTALCREWEQLTGAPLHNLYGPTEAAVDVSWYPACGPELAAVTGASVPIGWPVWNTGLRILDAAMRPVPPGVAGDLYLTGIQLAQGYLGRPDLTASRFIADPYAPGERMYRTGDVARWLDNGAVEYLGRSDDQLKIRGQRIELGEIDRALSALPDVAQAVAHACVFNQAAATGGDARQLVGYLVSASGLPLDTAALKAQLGEQLPPHMVPVVLIQLPALPLSANGKLDRKALPLPTLSSERSGRPPEPGVETAVAAAFSQLLGCEVNDIDADFFALGGHSLLAMRLAALLSRELERQVTPGQIMVASSVGKLSALLASDLSDEQAQRLGFDAVLPLRESDGPTLFCFHPASGFAWQFSVLARYLSPRWSIVGIQSPRPQGPMATAADLDAVCEHHLQTLLSQQPRGPYYLFGYSLGGTLAQGIAARLRQRGEAVAFLGLLDTWPPETQNWAEKEANGLDPEVLAEIAREREAFLAAQQGQASGELFSVIEGNYADAVRLLTTAHSAKFDGKATLFVAEKTRQPGMDPQVVWGPWIGELEVFSQDCAHVDIISPQAFEAIGPVVREILG

SEQ ID NO: 93077 - protein, 1293 aa, Klebsiella pneumoniae
  misc_feature (1)..(1293): tr|A0A486Q773|A0A486Q773_KLEPN Enterobactin non-ribosom al peptide synthetase EntF OS=Klebsiella pneumoniae OX= 573 GN=entF PE=4 SV=1
MTTRLPLVAAQPGIWMAERLSTLPGAWSVAHYVELRGALDPTLLGKAIVAGLQQADTLSLRFEEEEGEVWQWVAADRTFGEPSIIDLRTAPDPHRAATERMQADLAQDLRVDGGNPLVCHQLLRVGDDRWYWYQRYHHLLVDGFSFPAITRQIAAIYRAWQRGEATPESPFTPFAEVVDEYQRYAGSEAWQRDKAFWQAQRQALPAPASLSAAPLGGRAAGSDIWRMKLEMNADAFRRLASHAPQCQPADLALALTTLWLGRLCNRMDYAAGFIFMRRMGSAALTSTGPVLNVLPLAVHIDARETLADLAMRLAAQLKKMRRHQRYDAEQIVRDSGKAAGDEPLFGPVLNVKVFDYQLDIDGVQAVTHTLATGPVNDLELALFPDETGGLSLEILANKARYDEAELRRHMARLTALLAQFAADPTLRCGEAEMLSADELARLAAVNDTAVPLPATTLSALVADQARKTPDAPALADARWQFSYREMRQQVVALAQLLRQRGVKPGDSVAVALPRSVFLTLALHGIVEAGAAWLPLDTGYPDDRLRMMLEDARPSLLIATEDQLARFSDIPGLESLCYQQPLAAGDDAPLALSKPDHTAYIIFTSGSTGRPKGVMVGQTAIVNRLLWMQDRYPLSADDVVAQKTPCSFDVSVWEFWWPFIAGAQLVMAEPEAHRDPQAMQQFFARYGVTTTHFVPSMLAAFVASLDADSVAACRTLRRVFCSGEALPTELCREWERLTGAPLHNLYGPTEAAVDVSWYPACGPELAAVTGSSVPIGWPVWNTGLRILDAAMRPVPPGVAGDLYLTGIQLAQGYLGRPDLTASRFIADPFAPGERMYRTGDVARWLANGAVEYLGRSDDQLKIRGQRIELGEIDRVMSALPDVGQAVSHACVFNQAAATGGDARQLVGYLVSDSGLPLDTAALKARLAEQLPPHMVPVVLMQLAELPLSANGKLDRKALPLPTLGGERSGRPPEPGMETLVAAAFSQLLGCEVNDIDADFFALGGHSLLAMRLAAQLSRQLARQVTPGQVMVASTVGKLSALLAADLSDEQAQRLGLDTLLPLRESDGPTLFCFHPASGFAWQFSVLARYLSPRWSITGIQSPRPQGPMASAASLDEVCEHHLRTLLAQQPHGPYYLFGYSLGGTLAQGIAARLRQRGEAVAFLGLLDTWPPETQNWAEKEANGLDPEVLAEIDREREAFLAAQQGQASGELFSAIEGNYADAVRLLTSAHSAKFDGKATLFVAEKTRQEGMDPQVVWGPWVGELEVFSQNCAHVDIISPQAFEAIGPVVREILG

SEQ ID NO: 93078 - protein, 209 aa, Klebsiella pneumoniae
  misc_feature (1)..(209): tr|A0A5F0CXG9|A0A5F0CXG9_KLEPN Enterobactin synthase su bunit EntD OS=Klebsiella pneumoniae subsp. pneumoniae O X=72407 GN=entD PE=3 SV=1
MRHHRTALPLAGYTIQQIDFDPATFQPEDLFWLPYHASLTGWGRKRQAEHLAGRIAAAYALREVGEKRLPAIGDRRQPLWPTPWFGSISHCGQRALAVIADRPVGVDIERRFTPQLAAELESSIISPAEKTALLRSGLPYPLALTLAFSAKESGFKATPAANQRALGFADFQIVEITASTLALMFAEQRYLLHWIASEEQVITLCALQQ

SEQ ID NO: 93079 - protein, 1293 aa, Klebsiella quasipneumoniae
  misc_feature (1)..(1293): tr|A0A483KJ59|A0A483KJ59_9ENTR Enterobactin non-ribosom al peptide synthetase EntF OS=Klebsiella quasipneumonia e OX=1463165 GN=entF PE=4 SV=1
MTTRLPLVAAQPGIWMAERLSTLPGAWSVAHYVELRGALDPALLGKAIVAGLQQADTLSLRFEEEEGEVWQWLAAERTFGEPPIVDLRTAPDPHRAATERMQADLAQDLRVDGGNPLVCHQLLRVGDDHWYWYQRYHHLLVDGFSFPAITRQIAAIYRAWQRGEATPESPFTPFAEVVDEYQRYAGSEAWQRDKAFWQAQRQALPAPASLSAAPLGGRAAGGDIWRMKLAMNADAFRRLAGHAPQCQPADLALALTTLWLGRLCNRMDYAAGFIFMRRMGSAALTSTGPVLNVLPLAVHIDAQETLADLAMRLAAQLKKMRRHQRYDAEQIVRDSGKAAGDEPLFGPVLNVKVFDYQVDIDGVEAVTHTLATGPVNDLELALFPDETGGLSLELLANKARYDEAELRRHMARLTALLAQFAADPTLRCGEAEMLSADEQARLAAVNDTAMPLPATTLSALVADQARKTPDAPALADANWQFSYREMRQQVVALAQLLRQRGVKPGDSVAVALPRSVFLTLALHGIVEAGAAWLPLDTGYPDDRLRMMLEDARPSLLIATEDQLARFSDIPGLESLCYQQPLAVADDAPLALSKPEHTAYIIFTSGSTGRPKGVMVGQTAIVNRLLWMQDRYPLSADDVVAQKTPCSFDVSVWEFWWPFIAGAQLVMAEPEAHRDPQAMQQFFAHYGVTTTHFVPSMLAAFVASLDADSVAACRTLRRVFCSGEALPTELCREWERLTGAPLHNLYGPTEAAVDVSWYPACGPELAAVTGSSVPIGWPVWNTGLRILDAAMRPVPPGVAGDLYLTGIQLAQGYLGRPDLTASRFIADPFAPGERMYRTGDVARWLANGAVEYLGRSDDQLKIRGQRIELGEIDRVMSALPDVAQAVSHACVFNQAAATGGDARQLVGYLVSDSGLPLDTAALKARLAEQLPPHMVPVVLMQLPDLPLSANGKLDRKALPLPTLGGERSGRPPEPGMETVVAAAFSQLLGCEVNDIDADFFALGGHSLLAMRLAAQLSRQLARQVTPGQVMVASTVGKLSALLAADLSDEQAQRLGLDALLPLRESDGPTLFCFHPASGFAWQFSVLARYLSPRWSITGIQSPRPQGPMAGAASLDEVCEHHLQTLLAQQPHGPYYLFGYSLGGTLAQGIAARLRQRGEAVAFLGLLDTWPPETQNWAEKEANGLDPAVLAEIAREREAFLAAQQGQASGELFSAIEGNYADAVRLLTTAHSAKFDGKATLFVAEKTRQAGMDPQVVWGPWVGELEVFSQNCAHVDIISPQAFEAIGPVVREILG

SEQ ID NO: 93080 - protein, 1293 aa, Klebsiella quasipneumoniae
  misc_feature (1)..(1293): tr|A0A501APY7|A0A501APY7_9ENTR Enterobactin non-ribosom al peptide synthetase EntF OS=Klebsiella quasipneumonia e subsp. quasipneumoniae OX=1667327 GN=entF PE=4 SV=1
MTTRLPLVAAQPGIWMAERLSTLPGAWSVAHYVELRGALDPALLGKAIVAGLQQADTLSLRFEEEEGEVWQWLAAERTFGEPPIVDLRTAPDPHRAATERMQADLAQDLRVDGGNPLVCHQLLRVGDDHWYWYQRYHHLLVDGFSFPAITRQIAAIYRAWQRGEATPESPFTPFAEVVDEYQRYAGSEAWQRDKAFWQAQRQALPAPASLSAAPLGGRAAGSDIWRMKLAMNADAFRRLAGHAPQCQPADLALALTTLWLGRLCNRMDYAAGFIFMRRMGSAALTSTGPVLNVLPLAVHIDAQETLADLAMRLAAQLKKMRRHQRYDAEQIVRDSGKAAGDEPLFGPVLNVKVFDYQVDIDGVEAVTHTLATGPVNDLELALFPDETGGLSLEILANKARYDEAELRRHMARLTALLAQFAADPTLRCGEAEMLSADEQARLAAVNDTAMPLPATTLSALVADQARKTPDAPALADANWQFSYREMRQQVVALAQLLRQRGVKPGDSVAVALPRSVFLTLALHGIVEAGAAWLPLDTGYPDDRLRMMLEDARPSLLIATEEQLARFSDIPGLESLCYQQPLAVADDAPLALSKPEHTAYIIFTSGSTGRPKGVMVGQTAIVNRLLWMQDRYPLSADDVVAQKTPCSFDVSVWEFWWPFIAGAQLVMAEPEAHRDPQAMQQFFAHYGVTTTHFVPSMLAAFVASLDADSVAACRTLRRVFCSGEALPTELCREWERLTGAPLHNLYGPTEAAVDVSWYPACGPELAAVTGSSVPIGWPVWNTGLRILDAAMRPVPPGVAGDLYLTGIQLAQGYLGRPDLTASRFIADPFAPGERMYRTGDVARWLANGAVEYLGRSDDQLKIRGQRIELGEIDRVMSALPDVAQAVSHACVFNQAAATGGDARQLVGYLVSDSGLPLDTAALKARLAEQLPPHMVPVVLMQLPDLPLSANGKLDRKALPLPTLGGERSGRPPEPGMETVVAAAFSQLLGCEVNDIDADFFALGGHSLLAMRLAAQLSRQLARQVTPGQVMVASTVGKLSALLAADLSDEQAQRLGLDALLPLRESDGPTLFCFHPASGFAWQFSVLARYLSPRWSITGIQSPRPQGPMAGAASLDEVCEHHLQTLLAQQPHGPYYLFGYSLGGTLAQGIAARLRQRGEAVAFLGLLDTWPPETQNWAEKEANGLDPAVLAEIAREREAFLAAQQGQASGELFSAIEGNYADAVRLLTTAHSAKFDGKATLFVAEKTRQAGMDPQVVWGPWVGELEVFSQNCAHVDIISPQAFEAIGPVVREILG

SEQ ID NO: 93081 - protein, 209 aa, Klebsiella quasipneumoniae
  misc_feature (1)..(209): tr|A0A5C6IMX8|A0A5C6IMX8_9ENTR Enterobactin synthase su bunit EntD OS=Klebsiella quasipneumoniae subsp. similip neumoniae OX=1463164 GN=entD PE=3 SV=1
MRIHHATLPLAGYTLQQIDFDPATFQPEDLLWLPYHASLSGWGRKRQAEHLAGRIAAVYALREVGEKQPPAIGDRRQPLWPAPWFGSISHCGQRALAVVTDRPVGVDIERRFTPPLAAELESSIINEVEKKVLLHSGLPFPLALTLAFSAKESGFKATPTASQRALGFDDFQIVEVTASTVALRFAGQCYPLHWTASEEQVITLCALQQ

SEQ ID NO: 93082 - protein, 1293 aa, Klebsiella quasivariicola
  misc_feature (1)..(1293): tr|A0A556VH91|A0A556VH91_9ENTR Enterobactin non-ribosom al peptide synthetase EntF OS=Klebsiella quasivariicola OX=2026240 GN=entF PE=4 SV=1
MTTRLPLVAAQPGIWMAERLSTLPGAWSVAHYVELRGALDPTLLGKAIVAGLQQADTLSLRFEEEEGEVWQWLAADRTFGEPSIIDLRTAPDPHHAAVERMQADLAQDLRVDGGNPLVCHQLLRVGDDRWYWYQRYHHLLVDGFSFPAITRQIAAIYRAWQRGEATPESPFTPFAEVVDEYQRYAGSEAWQRDKAFWQAQRQALPAPASLSAAPLGGRAAGSDIWRMKLEMNADAFRRLAGHAPQCQPADLALALTTLWLGRLCNRMDYAAGFIFMRRMGSAALTSTGPVLNVLPLAVHIDARETLADLAMRLAAQLKKMRRHQRYDAEQIVRDSGKAAGDEPLFGPVLNVKVFDYQLDIDGIEAVTHTLATGPVNDLELALFPDETGGLSLEILANKARYDEAELRRHMARLTALLAQFAADPALRCGEAEMLSADELARLAAVNDTAVPLPATTLSALVADQARKTPDAPALADARWQFSYREMRQQVVALAQLLRQRGVKPGDSVAVALPRSVFLTLALHGIVEAGAAWLPLDTGYPDDRLRMMLEDARPSLLIASEDQLARFSDIPGLESLCYQQPLAAGDEAPLALSKPDHTAYIIFTSGSTGRPKGVMVGQTAIVNRLLWMQDRYPLSADDVVAQKTPCSFDVSVWEFWWPFIAGAQLVMAEPEAHRDPQAMQQFFARYGVTTTHFVPSMLAAFVASLDGDSVAACRTLRRVFCSGEALPTELCRDWERLTGAPLHNLYGPTEAAVDVSWYPACGPELAAVTGSSVPIGWPVWNTGLRILDAAMRPVPPGVAGDLYLTGIQLAQGYLGRPDLTASRFIADPFAPGERMYRTGDVARWLTNGAVEYLGRSDDQLKIRGQRIELGEIDRVMSALPDVAQALSHACVFNQAAATGGDARQLVGYLVSDSGLPLDTAALRARLAEQLPPHMVPVVLMQLAELPLSANGKLDRKALPLPTLGGERSGRPPEPGMETLVAAAFSQLLGCEVNDIDADFFALGGHSLLAMRLAAQLSRQLARQVTPGQVMVASTVGKLSALLAADLSDEQARRLGLDTLLPLRESDGPTLFCFHPASGFAWQFSVLARYLSPRWSITGIQSPRPQGPMASAASLDEVCEHHLRTLLAQQPHGPYYLFGYSLGGTLAQGIAARLRQRGEAVAFLGLLDTWPPETQNWAEKEANGLDPEVLAEIDREREAFLAAQQGQASGELFSAIEGNYADAVRLLTTAHSASFDGKATLFVAEKTRQAGMDPQVVWGPWVGELEVFSQNCAHVDIISPQAFEAIGPVVREILG

SEQ ID NO: 93083 - protein, 1285 aa, Klebsiella sp.
  misc_feature (1)..(1285): tr|A0A4S5DJR4|A0A4S5DJR4_9ENTR Enterobactin non-ribosom al peptide synthetase EntF OS=Klebsiella sp. Z2 OX=2561 928 GN=entF PE=4 SV=1
MNRLPLVAAQPGIWMAEQLSSLPNAWSVAHYTELKGAIDAPLLAKAIAEGMMQADTLRMRFAEDHGEVWQWIDEAMLLPEPSIVRVDSHDAAVALMEADLNQNLRVDSGQPLAFHQLIQVGESHWYWYQRYHHLVVDGFSFPAITRQIAAIYAAWQKGEPAPASPFTPFAEVVEEYQRYRDSEAYQRDGAFWAEQRQQLPSPVSLSSAPLPGHAATTDILRLKMAMDGRAFSQLAQMAGQAQRTDLALALVVLWLGRLTGRLDYAAGFIFMRRMGSAALTATGPVLNVLPLAVNIRPHESLPELALRLANQLKKMRRHQRYDAEQIVRDSGRAAGDEALFGPVLNVKVFDYQLDIDGVEAITHTLATGPVNDLELALFPDEQGGLSIEILANGQRYDEATLKGHAARLNAMLTQFAANPDLRCGDVDTVSEQEYARLARINDTGLALPSTTLADLVAEQASKTPDAPALADAHTELNYRQMREQVVALANLLRARGVKPGDSVAVALPRSVFLTLALHGIVEAGAAWLPLDTGYPDDRLRMMLEDAKPSLLITTDEQLPRFSDLSVETFSYNTLLPTSGAEPLRLAKPEQTAYIIFTSGSTGRPKGVMVGHTAIVNRLKWMQDHYPLTAHDVVAQKTPCSFDVSVWEFWWPFIAGAKLVMAEPDAHRDPQAMQSFFAEYGVTTTHFVPSMLAAFVASLTPENAHCCRTLKQVFCSGEALPTALCREWEQLTHAPLHNLYGPTEAAVDVSWYPAYGPELAAVEGNSVPIGFPVWNTGLRILDAMMRPVPFGVAGDLYLTGIQLAQGYLGRPDLTASRFIADPFAPGERMYRTGDVARWLDNGAVEYLGRSDDQLKIRGQRIELGEIDRAMLALPDVAQAVAHACVFNQAAATGGDARQLVGYVVSESGLPLDRDALLASLKAQLPPHMVPVVLLQISALPLSANGKLDRKALPLPDLTSKTSGRAPETQTEVAVAQAFSSLLGCAVNDIEADFFALGGHSLLAMRLAAQLSRAFSRKVTPGQIMVASTVSKLSALLDSQMSDEQAQRLGYETLLPLRESNGPTLFCFHPASGFAWQFSVLARYLSPRWSIVGIQSPRPNGPMQQCADLDGVIEHHLNTLRKQQPQGPYYLFGYSLGGTLAQGIAARLREQGEAVAFLGLLDTWPPETQNWAEKEANGLDPAVLAEIERERQAFIAAQQGQGSSELFNAIEGNYADAVRLLTTAHSARFDGKATLFVAERTRTQDPQAAWAPWVGELEVYSQDCAHVDIISPQAFEKIGPVLKEILG

SEQ ID NO: 93084 - protein, 1293 aa, Klebsiella variicola
  misc_feature (1)..(1293): tr|A0A4V3X0X3|A0A4V3X0X3_KLEVA Enterobactin non-ribosom al peptide synthetase EntF OS=Klebsiella variicola OX=2 44366 GN=entF PE=4 SV=1
MTTRLPLVAAQPGIWMAERLSTLPGAWSVAHYVELRGALDPALLGKAIVAGLQQADTLSLHFEEEEGEVWQWVAADRTFGEPSIIDLRTAPDPHRAATERMQADLAQDLRVDGGNPLVCHQLLRVGDDRWYWYQRYHHLLVDGFSFPAITRQIAAIYRAWQRGEATPESPFTPFAEVVDEYQRYAGSEAWQRDKAFWQAQRQALPAPASLSAAPLGGRAAGSDIWRMKLEMNADAFRRLAGYAPQCQPADLALALTTLWLGRLCNRMDYAAGFIFMRRMGSAALTSTGPVLNVLPLAVHIDAQETLADLAMRLAAQLKKMRRHQRYDAEQIVRDSGKAAGDEPLFGPVLNVKVFDYQLDIDGVQALTHTLATGPVNDLELALFPDETGGLSLEILANKARYDEAELRRHVARLTALLAQFAADPALRCGEAEMLSADELARLAAVNDTAVPLPATTLSALVADQARKTPDAPALADAHWQFSYREMRQQVVALAQLLRQRGVKPGDSVAVALPRSVFLTLALHGIVEAGAAWLPLDTGYPDDRLRMMLEDARPSLLITSEDQLARFSDIPGLESLCYQQPLAAGDDAPLALSKPDHTAYIIFTSGSTGRPKGVMVGQTAIVNRLLWMQDRYPLSADDVVAQKTPCSFDVSVWEFWWPFIAGAQLVMAEPEAHRDPQAMQQFFARYGVTTTHFVPSMLAAFVASLDADSVAACRTLRRVFCSGEALPTELCREWERLTGAPLHNLYGPTEAAVDVSWYPACGPELAAVTGSSVPIGWPVWNTGLRILDAAMRPVPPGVAGDLYLTGIQLAQGYLGRPDLTASRFIADPFAPGERMYRTGDVARWLTNGAVEYLGRSDDQLKIRGQRIELGEIDRVMSALPDVAQAVSHACVFNQAAATGGDARQLVGYLVSDSGLPLDTAALKARLAEQLPPHMVPVVLMQLADLPLSANGKLDRKALPLPTLGGERSGRPPEPGMETLVATAFSQLLGCEVNDIDADFFALGGHSLLAMRLAAQLSRQLARQVTPGQVMVASTVGKLSALLAADLSDEQARRLGLDTLLPLRESDGPTLFCFHPASGFAWQFSVLARYLSPRWSITGIQSPRPQGPMASAASLDEVCEHHLRTLLAQQSHGPYYLFGYSLGGTLAQGIAARLRQRGEAVAFLGLLDTWPPETQNWAEKEANGLDPEVLAEIDREREAFLAAQQGQASGELFSAIEGNYADAVRLLTTAHSAKFDGKATLFVAEKTRQAGMDPQVVWGPWVAELEVFSQNCAHVDIISPQAFEAIGPVVREILG

SEQ ID NO: 93085 - protein, 1295 aa, Kosakonia cowanii
  misc_feature (1)..(1295): tr|A0A410KG74|A0A410KG74_9ENTR Enterobactin non-ribosom al peptide synthetase EntF OS=Kosakonia cowanii OX=2082 23 GN=entF PE=4 SV=1
MSERLPLVAAQPGIWMAEKLSSLPNAWSVAHYVELEGDIDAVQLSEAIVTGLMQADTLRMRFTEDNGEVWQSVDETLTFAAPEIADLRQQGDAHSAALALMQADLAQNLRVESGKPLVHHQLMRVGERRWYWYQRYHHLLVDGFSFPAITRQIAAIYTAWRRGEPTPASPFTPFAEVVEEYQRYQGSDAFTRDAAFWAEQRRALPPPVSLSSEPLPGRAATTDILRLNVALESAAFRRLSQAMANTTPADLALALVALWLGRLCGRTDYAAGFIFMRRMGSAALTATGPVLNVLPMGIHLDGMQTLPELASDLARTLKVMRRHQRYDAEQIVRDAGRAAGSEPLFGPVLNVKLFDYQLRLDGIQGITHTLATGPVNDLEIAIFPDEAGGLSLEVLANRSRYDEATLNTHVARLAQLLQQFADNPALRCGDAELLTAKEAEQLSQINATAVSLPATTLSELVALQAVKTPDAPALSDARWRFSYREMREQVVALANQLRALGVQPGDSVAVALPRSVFLTLALHGIVEAGAAWLPLDTGYPDDRLRMMLEDARPRLLITTDDQYARFADIPGLAHFCYDAPLESNGAETLNLARPEQTAYIIFTSGSTGRPKGVMVGHTAIVNRLLWMQAAYPLSANDVVAQKTPCSFDVSVWEFWWPFIAGASLVMAEPEAHRDPQALQAFFAEAGVTTTHFVPSMLAAFVASLTPESAQQSCRTLKQVFCSGEALPADLCREWEALTGVALHNLYGPTEAAVDVSFYPAYGETLAQVRGNSVPIGYPVWNTGLRILDAMMRPVPFGVAGDLYLTGIQLAQGYLGRPDLTASRFIADPFAPGERMYRTGDVARWLEGGAVEYLGRSDDQLKIRGQRIELGEIDRAMLALPDIAQAVAHACVFNQAAASGGDARQLVGYLVSSSAQQLDTAALLEQLRAQLPAHMVPVLLMQLSALPLSANGKLDRKALPLPALQAEQGGRPLNAGMETQVAQAFAALLGCEVNDAQADFFALGGHSLLAMRLAAQLSRQCDRQVTPGQIMVAPTVEKLAALLEQPLSNEQAGRLGLEAVLPLRESAGPTLFCFHPASGFAWQFSVLARYLAPRWSITGIQSPRPDGPLQQAATLDEACDQQLATLLAQQPHGPYYLFGYSLGGTLAHSIAARLRQRGEEVAFLGLLDTWPPETQNWAEKEANGLDPAVLAEIERERQAFLAAQQGQASTELFSQIEGNYVDAVRLLTTAHSVPFDGKATLFVAERTLPPGTDPQRAWAPWVRELAVYRQDCAHVDIISPQAFGQIGPVLRELLER

SEQ ID NO: 93086 - protein, 1295 aa, Kosakonia radicincitans
  misc_feature (1)..(1295): tr|A0A5C1PD70|A0A5C1PD70_9ENTR Enterobactin non-ribosom al peptide synthetase EntF OS=Kosakonia radicincitans O X=283686 GN=entF PE=4 SV=1
MTQRLPLVAAQPGIWMAEKLSSLPNAWSVAHYVELKGDIDAALLAQAIVTGMAQADTLRMRFEEDNGDVWQWVDESQQFAQPAITDLRSHSDAHTAALNIMRADLAQNLRVESGKPLVCHQLLRVGEQCWYWYQRYHHLLVDGFSFPAITRQIAAIYSAWRRGDETPSSPFTPFAEVVEEYQRYRDSDGWQRDAAFWAKQRSELPPPVSLSPTPLPGRAATTDILRLNVALNADDFRCLTRALPNSQPADLGLALVALWLGRLCGRMDYAAGFIFMRRMGSAALTATGPVLNVLPLGIHIDGAQTLAELAAQLEGSLKVMRRHQRYDAEQIVRDAGRAAGDEPLFGPVFNVKMFDYLLDVDGIHGITHTLATGPVNDLEIALFPDEEGGLAVEVLANRSRYDEATLRGHVARLGQLLAQFAENPALRSGDADLLAPHEAQQLAKINDTGMMLPTTTLSDLVAMQAAKTPDAPALRDARWQFSYREMREQVVALAQHLRQLGVQPGDSVAVALPRSVFLTLALHGIVEAGAAWLPLDTGYPDERLRMMLEDAQPRLLITAEDQLSRFSDIPGLAHFCYQQPLAAQGSEALNLARPEQTAYIIFTSGSTGRPKGVMVGQTAIVNRLLWMQEQYPLTAQDVVAQKTPCSFDVSVWEFWWPFIAGASLVMAEPEAHRDPQALQAFFAEYGVTTTHFVPSMLAAFVASLTPESAQQRCRTLKQVFCSGEALPAELCREWQHLTGAPLHNLYGPTEAAVDVSWYPAHGEALAQVRGNSVPIGFPVWNTGLRILDGMMRPVPPGVAGDLYLTGIQLAQGYLGRPDLTASRFIADPFAPGERMYRTGDVARWLENGAVEYLGRSDDQLKIRGQRIELGEIDRAMLALADVAQAVAHACVFNQAAASGGDARQLVGYVVSASGLPLDTAALLDQLREQLPPHMVPVRLLQLSALPLSANGKLDRKALPLPELAAARCGRPVNTGMETRVAQAFAALLGCEVQDAQADFFALGGHSLLAMRLAAQLSREHQRPVTPGQIMVASTVEKLAALLEQSLTAEQAQRLGMETLLPLRESDGPTLFCFHPASGFAWQFSVLARYLAPRWSITGIQSPRPFGPLQQAATLDEACEQHLATLLAQQPHGPYHLFGYSLGGTLAQGIAARLRARGEEVAFLGLLDTWPPETQNWAEKEANGLDPQVLAEIERERQAFLAAQQGQGSGELFSTIEGNYADAVRLLSTAHSLPFDGKATLFVAERTLPAGTDPHKAWAPWVRELAVYRQDCAHVDIISPQAFERIGPVLREILGE

SEQ ID NO: 93087 - protein, 1295 aa, Kosakonia sp.
  misc_feature (1)..(1295): tr|A0A4R0HSX7|A0A4R0HSX7_9ENTR Enterobactin non-ribosom al peptide synthetase EntF OS=Kosakonia sp. WCHEs120001 OX=2529380 GN=entF PE=4 SV=1
MTQRLPLVAAQPGIWMAEKLSTLPNAWSVAHYVELKGDIDAALLAQAIVSGLSQADTLRMRFEEENGEVWQWVDEAHVFALSEVVDLRDNRSPRAAALQAMQADLAQNLRVESGKPLVCHLLLRVGEQHWYWYQRYHHLLVDGFSFPAITRQIAAIYSAWRRSEATPASPFTPFAEVVEEYQRYRESDAWPRDRAFWAQQRSALPSPVSLSDTPLPGRAATTDILRLNAAMDTDAFRRVTQAFSHHAPADLALALAALWLGRLCGRTEYAAGFIFMRRMGSAALTASGPVLNVLPLGIHLDGTQTLSGLATTLAGSLKAMRRHQRYDAEQIVRDAGCAAGDEPLFGPVFNVKMFDYLLDVDGIKGTTHTLTTGPVNDLEIALFPHEEGGLSLEVLANRSRYDQSTLTTHVERLAHLLKQFAENPQLRCGDAELLLSPEAQRLAEINDTGMMLPTTTLSALVAAQAEKTPDAPALADVQWQFSYREMREQVVALAQQLRQLGVQPGDSVAVALPRSVFLTLALHGIVEAGAAWLPLDTGYPDERLKMMLEDAKPRLIITAQNQLARFSDMPGLRHFCYEAPLETHGSEALNLARPEHTAYIIFTSGSTGRPKGVMVGQTAIVNRLLWMQESYPLTAQDVVAQKTPCSFDVSVWEFWWPFIAGARLVMAEPDAHRDPHALQEFFTHYGVTTTHFVPSMLAAFVASLTPESAQRSCHTLKQVFCSGEALPANLCREWQQLTGAPLHNLYGPTEAAVDVSWYPAYGEALAGVRGNSVPIGFPVWNTGLRILDAMMRPVPPGVAGDLYLTGIQLAQGYFGRPDLTASRFIADPFAAGERMYRTGDVARWLENGAVEYLGRSDDQLKIRGQRIELGEIDRAMLALPDVAQAVAHACVLNQAAASGGDARQLVGYVVSASGQTLDAATLLAQLREQLPPHMVPVLLVQLDVLPLSANGKLDRKALPLPELAVQQGGRPLNAGLETIVAQAFAGLLGCEVNDAQADFFALGGHSLLAMRLAAQLSRECERQVTPGQIMVASTVEKLASMLEQTLSAEQAGRLGLETLLPLRASDGPTLFCFHPASGFAWQFSVLARYLAPRWSITGIQSPRPDGPLQQAATLDEACEQHLATLLAQQPHGPYYLLGYSLGGTLAQGIAARLRQRGEAVAFLGLLDTWPPETQNWAEKEANGLDPAVLAEIERERQAFLAAQQGQASGELFSVIEGNYADAVRLLTTAHSLPFDGKATLFVAGRTLPAGTDPHTAWAPWVRELEFYRQDCAHVEIISPQAFERIGPVLREVLGE

SEQ ID NO: 93088 - protein, 214 aa, Leclercia adecarboxylata
  misc_feature (1)..(214): tr|A0A5B7XQW2|A0A5B7XQW2_9ENTR Enterobactin synthase su bunit EntD OS=Leclercia adecarboxylata OX=83655 GN=entD PE=3 SV=1
MHTHHSTFLLAGQTLHRITFDPATFTDADLLWLPHHHQLADAGRKRKADHLAGRIAAFHALNRQAIPAIGSSGEPLWPVGVSGSLSHSGTLAVAICREGGLIGVDCEAIIDESEAREIQDGVIDVQEARVLAGCGLPFSLAFTLAFSAKESLFKALFPQVQAWMGFESARVTALTNDTLTLILTRPLPPFAQNQAFTAHWLRSDATVVTLICDE

SEQ ID NO: 93089 - protein, 224 aa, Lelliottia nimipressuralis
  misc_feature (1)..(224): tr|A0A4Y8IYU1|A0A4Y8IYU1_9ENTR Enterobactin synthase su bunit EntD OS=Lelliottia nimipressuralis OX=69220 GN=en tD PE=3 SV=1
MHTTHRTFALANLAVHRITFDPTTFTDADLLWLPHHAQLADAGRKRKTEHLAGRIAAAHALPDHPIPGIGTSGEPLWPDGISGSITHSGTQAMAVVVRERQALIGIDCEAILPENEAREIKDGVIDVQEEPVLSRSGYPFALALTLVFSAKESLFKALFPRVQAYMGFDSARVTELDDKTLTLALTRQLAGFNEGAAFTLHWQQQGEQAITLLSRSPADGPSRW

SEQ ID NO: 93090 - protein, 264 aa, Mycobacterium talmoniae
  misc_feature (1)..(264): tr|A0A2S8BG73|A0A2S8BG73_9MYCO Enterobactin synthase co mponent E OS=Mycobacterium talmoniae OX=1858794 GN=entE PE=4 SV=1
MSTGGPSAADSPAFTAEDAARYHAAGWWSDTTLSAVVHRHAQRTPERVAYLDYPGAALTWREFDDAANTLAAQRAGAGVTRGDRVAVWHGDSAAIHVLFVAIERCGAVVVGIGARAGTREVTAILRSARPTILITDPPRQAPAAQAEADVPVLVLRHNPAGPTLNVQPAALPADAGFGPDEVFLINSTSGTTGLPKCVVHTQNRWYYFHQKAVAHGRLTDDDIFLPVIPTPFGFGLWTSHATPIHLAPPRCCWTGSAPRRPAKP

SEQ ID NO: 93091 - protein, 217 aa, Pseudocitrobacter sp.
  misc_feature (1)..(217): tr|A0A5B0K3I2|A0A5B0K3I2_9ENTR Enterobactin synthase su bunit EntD OS=Pseudocitrobacter sp. 73 OX=2605731 GN=en tD PE=3 SV=1
MQTNHSTFTLARHLLHRIDFQPETFSDGDLLWLPHHADLVHFGKKRRIEHLAGRIAAAYALQPLGVKAIPGIGEQRQPLWPEGIFGSISHSGKRAIAAVSQTPVGIDIEHIFSSQLAAEVATQIASPAEIFRLQTSGLPFAVALTLAFSAKESVYKAFSSQAEPCPGFAAAEMTAIDENALCLRLTPAFSTQLAGKEISVAYEVEGDEVVTCTVMPL

SEQ ID NO: 93092 - protein, 611 aa, Pseudomonas fluorescens
  misc_feature (1)..(611): tr|A0A5E7JKS8|A0A5E7JKS8_PSEFL Enterobactin synthase co mponent E OS=Pseudomonas fluorescens OX=294 GN=entE PE= 4 SV=1
MTIEFNHWPLESAQRYRDKGYWLDKPLTHLLQERSQSQPDAPAIICGDRHFSYAELDQLSSNLASRLAASGLGNGDTALVQLPNIAEFYIVLFALLKSGIAPLNALYSHRKLELKSYAKQIAPTLLIASREHEVFRDDSYIADFKEVGSSPDIILLLGEQRHENNLADWINTPSESNVNVSPSGPGEVALFQLSGGSTGTPKLIPRTHNDYYYNARASAQVCELTPRTRFLCALPAAHNFLLSSPGALGVLHAGGCIILAPSPEPLTCFSIIQRQEVNTVALVPSAVALWLQAAPEHKEQLQSLEFLQVGGACFADSLARQVPGVLGCKLQQVFGMAEGLINYTRLNDSDEQIFTTQGRPISPDDEIKIVDEQGLPVPDGEPGMLATRGPYTFCGYYQSPEQNAQAFDNEGYYYSGDLVQRMPSGDLRVVGRVKDQINRGGEKVASEEIENLIVLHPDVTHAGLVAMPDDRLGEKSCAFVVSRNPSLKPPALRRHLMELGIAEYKLPDRIRLIETMPLTPVGKIDKKHLRQLLAAETTRAWLQTRVRQLVEDCEDLDPEENLIFYGLDSLQVMRLAAELKERGIAVSFEELADSPTLSSWWSLVDARQIAA

SEQ ID NO: 93093 - protein, 210 aa, Raoultella planticola
  misc_feature (1)..(210): tr|A0A4U0PDT7|A0A4U0PDT7_RAOPL Enterobactin synthase su bunit EntD OS=Raoultella planticola OX=575 GN=entD PE=3 SV=1
MQTTHSTFLFAGHRLHQIDFDPATFAPHDILWLPHHQQLENCGRKRQMEHLAGRIAAACALKAVGVKGVPGTGDQRQPLWPVPWSGSISHCDTRALAVVAARPVGIDIENVLTPALATELESSIISPTERAVLKASGLPFELALTLAFSAKESGFKALPITQQSGTGFMHFRITDIQGEVVTLWTEQQMYQVHWMAVEPCVITLCQTQYR

SEQ ID NO: 93094 - protein, 1294 aa, Salmonella abony
  misc_feature (1)..(1294): tr|A0A5I5TXL3|A0A5I5TXL3_SALAB Enterobactin non-ribosom al peptide synthetase EntF OS=Salmonella abony OX=29482 GN=entF PE=4 SV=1
MTQRLPLVAAQPGIWMAEKLSDLPSAWSVAHYVELNGELDVALLAKAVAVGMQQADTLRMRFTEENGEVWQWIDPEHTFGEPPIADLRDHPDPHHAALALMQADLRQNLRADSGKPLAFHQLIRIDDTRWYWYQRYHHLLVDGFSFPAITRQIAAIYRAWQSDAPTPESPFTPFADVVEEYQRYRQSEAWQRDGAFWAQQRRELPPPASISAAPLPGRSASADILRMKLSAPAGAFRQLAAHMPEIPRADLALALVTLWLGRLCGRMDYAAGFIFMRRMGSAALTATGPVLNVLPLAVNLYATEDLPTLAKRLAVQLKKMRRHQRYDAEQIVRDSGRAAGETPLFGPVLNIKVFDYHLDLPGIQAQTHTLATGPVNDLELALFPDENGGLDIELLANAQRYDGATLSRHALRLMALITQFADNPALCCGDAQMLLAEEQTQLTHLNNTAVTIPAATLSDLVAQQAQKTPEASALADAHYHFTYREMREQVVALAYALRERGVQPGDSVAVALPRSVFLTLALHGIVEAGAAWLPLDTGYPDDRLRMMLEDAQPKLLITTQAQLARFHDIPGMEYLCYSQPLPVSDATPLGLSLPHHTAYIIFTSGSTGRPKGVMVGQTAIVNRLLWMQDHYPLTADDVVAQKTPCSFDVSVWEFFWPFIAGAKLVMAEPEAHRDPLAMQRFFAQYGVTTTHFVPSMLAAFIASLTPASAGKSCASLKRVFCSGEALPTALCREWETLTNAPLHNLYGPTEAAVDVSWYPACGDELAAVDGNSIPIGYPVWNTGLRILDAHMQPVPPGVAGDLYLTGIQLAQGYLGRPDLTASRFIADPFAPGERMYRTGDVARWLDSGAVEYLGRSDDQLKIRGQRIELGEIDRVMQTLPDVEQAVAHACVFNQAAATGGDARQLVGYLVSHSGLPLDLPALQEKLRQKLPAHMVPVVLLQLAGLPLSANGKLDRKALPLPDLTPRVKGRAPQSATEIAVAAAFSRLLGCEINDVESDFFALGGHSLLAMKLAAQLSQTFNRQVTPGQVMVASDVAQLSKLLDTDDDERSRNLGFGPLLPLRESDGPTLFCFHPASGFAWQFSVLSRYLSPSWSIMGIQSPRPAGPMQTATTLDEVCEHHLATLLARQPHGPYYLLGYSLGGTLAQGIAARLCARGETVAFLGLLDTWPPETQNWREKEANGLNSDVLAEIERERAAFVAAQQGNASEALFTAIEGNYADAVRLLTTAHSVPFDGHATLFVADKTVPEGVSPEQSWSPWIASLAIYRQPCAHVDIISPSAFETIGPIISELINK

SEQ ID NO: 93095 - protein, 1294 aa, Salmonella anatum
  misc_feature (1)..(1294): tr|A0A2T8MN70|A0A2T8MN70_SALAN Enterobactin non-ribosom al peptide synthetase EntF OS=Salmonella anatum OX=5871 2 GN=entF PE=4 SV=1
MTQRLPLVAAQPGIWMAEKLSDLPSAWSVAHYVELNGELDAPLLAKAVAVGMQQADTLRMRFTEENGEVWQWIDPEHTFGEPPIADLRDHPDPHHAALALIQADLRQNLRADSGKPLAFHQLIRIDDTRWYWYQRYHHLLVDGFSFPAITRQIAAIYRAWQSDAPTPESPFTPFADVVEEYQRYRQSEVWQRDGAFWAQQRRELPPPASISAAPLPGRSASADILRMKLSAPAGAFRQLAAHMPEIPRADLALALVTLWLGRLCGRMDYAAGFIFMRRMGSAALTATGPVLNVLPLAVNLHATEDLLTLAKRLAAQLKKMRRHQRYDAEQIVRDSGRAAGETPLFGPVLNIKVFDYYLDLPGIQAQTHTLATGPVNDLELALFPDENGGLDIELLANAQRYDDATLSRHALRLMALITQFADNPALRCGDAQMLLAEEQTQLTHLNNTAVTIPAATLSDLVAQQAQKTPEASALADAHYHFTYREMREQVVALAYALRERGVQPGDSVAVALPRSVFLTLALHGIVEAGAAWLPLDTGYPDDRLRMMLEDAQPKLLITTQAQLARFHDIPGMEYLCYSQPLPVSNATPLGLSLPHHTAYIIFTSGSTGRPKGVMVGQTAIVNRLLWMQDHYPLTADDVVAQKTPCSFDVSVWEFFWPFIAGAKLVMAEPEAHRDPLAMQRFFAQYGVTTTHFVPSMLAAFIASLTPASAGKSCASLTRVFCSGEALPTALCREWETLTNAPLHNLYGPTEAAVDVSWYPACGDELAAVDGNSIPIGYPVWNTGLCILDAHMQPVPPGVAGDLYLTGIQLAQGYLGRPDLTASRFIADPFAPGERMYRTGDVARWLDSGAVEYLGRSDDQLKIRGQRIELGEIDRVMQTLPDVEQAVAHACVFNQAAATGGDARQLVGYLVSHSGLPLDLPALQEKLRQKLPAHMVPVVLLQLAGLPLSANGKLDRKALPLPDLTPRVKGRAPQSATEIAVAAAFSRLLGCEINDVESDFFALGGHSLLAMKLAAQLSQTFNRQVTPGQVMVASDVAQLSKLLDTDDDERSRNLGFGPLLPLRESDGPTLFCFHPASGFAWQFSVLSRYLSPSWSIMGIQSPRPAGPMQTATTLDEVCEHHLATLLARQPHGPYYLLGYSLGGTLAQGIAARLRARGETVAFLGLLDTWPPETQNWREKEANGLNPDVLAEIERERAAFVAAQQGNASDALFTAIEGNYADAVRLLTTAHSVPFDGHATLFVADKTVPEGVSPEQSWSPWIASLAIYRQPCAHVDIISPSAFETIGPIISELINK

SEQ ID NO: 93096 - protein, 1294 aa, Salmonella berta
  misc_feature (1)..(1294): tr|A0A3U8PJX7|A0A3U8PJX7_SALBE Enterobactin non-ribosom al peptide synthetase EntF OS=Salmonella berta OX=28142 GN=entF PE=4 SV=1
MTQRLPLVAAQPGIWMAEKLSDLPSAWSVAHYVELNGELDVALLAKAVAVGMQQADTLRMRFTEENGEVWQWIDPEHTFGEPPIADLRDHPDPHHAALALMQADLRQNLRADSGKPLAFHQLIRIDDTRWYWYQRYHHLLVDGFSFPAITRQIAAIYRAWQSDAPTPESPFTPFADVVEEYQRYRQSEAWQRDGAFWAQQRRELPPPASISAAPLPGRSASVDILRMKLSAPEGAFRQLAAHMPEIPRADLALALVTLWLGRLCGRMDYAAGFIFMRRMGSAALTATGPVLNVLPLAINLHATEDLPTLAKRLAAQLKKMRRHQRYDAEQIVRDSGRAAGETPLFGPVLNIKVFDYYLDLPGIQAQTHTLATGPVNDLELALFPDENGGLDIELLANAQRYDDATLSRHALRLMALITQFADNPALRCGDAQMLLAEEQTQLTHLNNTAVTIPAATLSDLVAQQAQKTPEASALADAHYHFTYREMREQVVALAYALRERGVQPGDSVAVALPRSVFLTLALHGIVEAGAAWLPLDTGYPDDRLRMMLEDAQPKLLITTQAQLARFHDIPGMEYLCYSQPLPVSDATPLGLSLPHHTAYIIFTSGSTGRPKGVMVGQTAIVNRLLWMQDHYPLTADDVVAQKTPCSFDVSVWEFFWPFIAGAKLVMAEPEAHRDPLAMQRFFAQYGVTTTHFVPSMLAAFIASLTPASAGKSCASLKRVFCSGEALPTALCREWETLTNAPLHNLYGPTEAAVDVSWYPACGDELAAVDGNSIPIGYPVWNTGLRILDAHMQPVPPGVAGDLYLTGIQLAQGYLGRPDLTASRFIADPFAPGERMYRTGDVARWLDSGAVEYLGRSDDQLKIRGQRIELGEIDRVMQTLPDVEQAVAHACVFNQAAATGGDARQLVGYLVSHSGLPLDLPALQEKLRQKLPAHMVPVVLLQLAGLPLSANGKLDRKALPLPDLTPRVKGRAPQSATEIAVAAAFSRLLGCEINDVESDFFALGGHSLLAMKLAAQLSQTFNRQVTPGQVMVASDVAQLSKLLDTDDDERSRNLGFGPLLPLRESDGPTLFCFHPASGFAWQFSVLSRYLSPSWSIMGIQSPRPAGPMQTATTLDEVCEHHLATLLARQPHGPYYLLGYSLGGTLAQGIAARLRARGETVAFLGLLDTWPPETQNWREKEANGLNPDVLAEIERERAAFVAAQQGNASEALFTAIEGNYADAVRLLTTAHSVPFDGHATLFVADKTVPEGVSPEQSWSPWIASLAIYRQPCAHVDIISPSAFETIGPIISELINK

SEQ ID NO: 93097 - protein, 1294 aa, Salmonella blockley
  misc_feature (1)..(1294): tr|A0A5I2JXK1|A0A5I2JXK1_SALBL Enterobactin non-ribosom al peptide synthetase EntF OS=Salmonella blockley OX=57 741 GN=entF PE=4 SV=1
MTQRLPLVAAQPGIWMAEKLSDLPSAWSVAHYVELNGELDAALLAKAVAVGMQQADTLRMRFTEENGEVWQWIDPEHTFGEPPIADLRDHPDPHHAALALMQADLRQNLRADSGKPLAFHQLIRIDDTRWYWYQRYHHLLVDGFSFPAITRQIAAIYRAWQSDAPTPESPFTPFADVVEEYQRYRQSEAWQRDGAFWAQQRRELPPPASISAAPLPGRSASADILRMKLSAPAGAFRQLAAHMPEIPRADLALALVTLWLGRLCGRMDYAAGFIFMRRMGSAALTATGPVLNVLPLAVNLHATEDLPTLAKRLAAQLKKMRRHQRYDAEQIVRDSGRAAGETPLFGPVLNIKVFDYHLDLPGIQAQTHTLATGPVNDLELALFPDENGGLDIELLANAQRYDDATLSRHALRLMALITQFADNPALRCGDAQMLLAEEQTQLTHLNNTAVTIPAATLSDLVAQQAQKTPEASALADAHYHFTYREMREQVVALAYALRERGVQPGDSVAVALPRSVFLTLALHGIVEAGAAWLPLDTGYPDDRLRMMLEDAQPKLLITTQAQLARFHDIPGMEYLCYSQPLPVSNATPLGLSLPHHTAYIIFTSGSTGRPKGVMVGQTAIVNRLLWMQDHYPLTADDVVAQKTPCSFDVSVWEFFWPFIAGAKLVMAEPEAHRDPLAMQRFFAQYGVTTTHFVPSMLAAFIASLTPASAGKSCTSLKRVFCSGEALPTALCREWETLTNAPLHNLYGPTEAAVDVSWYPACGDELAAVDGNSIPIGYPVWNTGLRILDAHMQPVPPGVAGDLYLTGIQLAQGYLGRPDLTASRFIADPFAPGERMYRTGDVARWLDSGAVEYLGRSDDQLKIRGQRIELGEIDRVMQTLPDVEQAVAYACVFNQAAATGGDARQLVGYLVSHSGLPLDLPALQEKLRQKLPAHMVPVVLLQLAGLPLSANGKLDRKALPLPDLTPRVKGRAPQSATEIAVAAAFSRLLGCEINDVESDFFALGGHSLLAMKLAAQLSQTFNRQVTPGQVMVASDVAQLSKLLDTDDDERSRNLGFGPLLPLRESDGPTLFCFHPASGFAWQFSVLSRYLSPSWSIMGIQSPRPAGPMQTATTLDEVCEHHLATLLARQPHGPYYLLGYSLGGTLAQGIAARLRARGETVAFLGLLDTWPPETQNWREKEANGLNPDVLAEIERERAAFVAAQQGNASEALFTAIEGNYADAVRLLTTAHSVPFDGHATLFVADKTVPEGVSPEQSWSPWIASLAIYRQPCAHVDIISPSAFETIGPIISELINK

SEQ ID NO: 93098 - protein, 1294 aa, Salmonella bongori
  misc_feature (1)..(1294): tr|A0A5I6N1K6|A0A5I6N1K6_SALBN Enterobactin non-ribosom al peptide synthetase EntF OS=Salmonella bongori CFSAN0 00510 OX=1299282 GN=entF PE=4 SV=1
MTQRLPLVAAQPGIWMAEKLSDLPSAWSVAHYVELTGELDAVLLAKAVTAGMRQADTLQMRFTEENGEVWQWIDPGHTFGEPTITDLRDQTDPHQAALDIMQADLRQNLRADSGKPLAFHQLMRIDDTRWYWYQRYHHLLVDGFSFPAITRQIVAIYRAWRSGVPTPDSPFTPFADVVEEYLRYRQSEAWQRDGAFWAQQRCELPPPASISAAPLPGRPANAETLRMKLTAPEGAFRQLAAQMPDIPRADLALALVTLWLGRLCGRMNYAAGFIFMRRMGSAALTATGPVLNVLPLAVNIHATENLPMLARRLATQLKKMRRHQRYDAEQIVRDSGRAAGETPLFGPVLNIKVFDYHLDFPDIQAQTHTLATGPVNDLELALFPDENGGLDVELLANSQRYDEATLSRHALRLMALIRQFADNPALCCGDAQMLLADETEQLTRLNDTAVTIPVATLSDLVAQQARKTPQAPALIDAHYHFTYREMREQVVALAHALRERGVQPGDSVAVALPRSVFLTLALHGIVEAGAAWLPLDTGYPDDRLRMMLEDAQPKLLITTQAQLVRFHDIPGMEYFCYSEPLPGGDTTPLGLSLPQHTAYIIFTSGSTGRPKGVMVGQTAIVNRLLWMQDHYPLNADDVVAQKTPCSFDVSVWEFFWPFITGAKLVMAEPEAHRDPLAMQQFFAQYGVTTTHFVPSMLAAFIASLTPESAESACATLKRVFCSGEALPTALCRDWEMLTAVPLHNLYGPTEAAVDVSWYPACGTELSANGGNSIPIGYPVWNTGLRILDAHMQPVPPGVAGDLYLTGIQLAQGYLGRPDLTACRFIADPFAPGERMYRTGDVARWLDSGAVEYLGRSDDQLKIRGQRIELGEIDRVMQMLPDVEQAVAHACIFNQAAATEGDARQLVGYLVSHSGLPLDLSALQEKLRQKLPAHMVPVVLLQLASLPLSANGKLDRKALPLPELTPRVNGRAPQSATERAVAAAFSRLLGCEINDVESDFFALGGHSLLAMKLAAQLSRTFNRQVTPGQVMVASDVAQLSKLLETDDDERSRNLGFGPLLPLRESNGPTLFCFHPASGFAWQFSVLSRYLSPPWSIIGIQSPRPVGPLQTAANLDEVCERHLATLLARQPHGPYYLLGYSLGGTLAQGIAARLRARGETVAFLGLLDTWPPETQNWRKKEANGLNPDVLAEIERERAAFVAAQQGKASEAFFAAIEGNYADAVRLLTTAHSVPFDGHATLFVADKTVPEGVSPEQSWLPWIASMTIYRQPCAHVDIISPTAFETIGPVINALINK

SEQ ID NO: 93099 - protein, 1294 aa, Salmonella derby
  misc_feature (1)..(1294): tr|A0A4Z8UMA8|A0A4Z8UMA8_SALDE Enterobactin non-ribosom al peptide synthetase EntF OS=Salmonella derby OX=28144 GN=entF PE=4 SV=1
MTQRLPLVAAQPGIWMAEKLSDLPSAWSVAHYVELNGELDAPLLAKAVAVGMQQADTLRMRFTEENGEVWQWIDPEHTFGEPPIADLRDQPDPHHAAQVLMQADLRQNLRADSGKPLAFHQLIRIDDTRWYWYQRYHHLLVDGFSFPAITRQIAAIYRAWQSEAPTPESPFTPFVDVVEEYQRYRQSEAWQRDGAFWAQQRRELPPPASISAVPLPGRSASAGILRMKLSAPEGAFRQLAAHMPEIPRADLALALVTLWLGRLCGRMDYAAGFIFMRRMGSAALTATGPVLNVLPLAVNLHATEDLPTLAKRLAAQLKKMRRHQRYDAEQIVRDSGRAAGETPLFGPVLNIKVFDYHLDLPGIQAQTHTLATGPVNDLELALFPDENGGLDIELLANAQRYDGATLSRHALRLMALITQFADNPAMCCGDAQMLLAEEQTQLTHLNNTAVTIPAATLSDLVAQQAQKTPEAAALADAHYHFTYREMREQVVALAYALRERGVQPGDSVAVALPRSVFLTLALHGIVEAGAAWLPLDTGYPDDRLRMMLEDAQPKLLITTQAQLARFHDIPGMEYLCYSQPLPVSDATPLGLSLPHHTAYIIFTSGSTGRPKGVMVGQTAIVNRLLWMQDHYPLTADDVVAQKTPCSFDVSVWEFFWPFIAGAKLVMAEPEAHRDPLAMQRFFAQYGVTTTHFVPSMLAAFIASLTPASAGKSCASLTRVFCSGEALPTALCREWETLTNAPLHNLYGPTEAAVDVSWYPACGDELAAVDGNSIPIGYPVWNTGLRILDAHMQPVPPGVAGDLYLTGIQLAQGYLGRPDLTASRFIADPFAPGERMYRTGDVARWLDSGAVEYLGRSDDQLKIRGQRIELGEIDRVMQTLPDVEQAVAHACVFNQAAATGGDARQLVGYLVSHSGLPLDLPALQEKLRQKLPAHMVPVVLLQLAGLPLSANGKLDRKALPLPDLTPRVKGRAPQSATEIAVAAAFSRLLGCEINDVESDFFALGGHSLLAMKLAAQLSQTFNRQVTPGQVMVASDVAQLSKLLDTDDDERSRNLGFGPLLPLRESDGPTLFCFHPASGFAWQFSVLSRYLSPSWSIMGIQSPRPAGPMQTATTLDEVCEHHLATLLARQPHGPYYLLGYSLGGTLAQGIAARLRARGETVAFLGLLDTWPPETQNWREKEANGLNPDVLAEIERERAAFVAAQQGNASEALFTAIEGNYADAVRLLTTAHSAPFDGHATLFVADKTVPEGVSPEQSWSPWIASLAIYRQPCAHVDIISPSAFETIGPIISELINK

SEQ ID NO: 93100 - protein, 234 aa, Salmonella dublin
  misc_feature (1)..(234): tr|A0A5I9Y8J3|A0A5I9Y8J3_SALDU Enterobactin synthase su bunit EntD OS=Salmonella dublin OX=98360 GN=entD PE=4 S V=1
MRTSHFPLPFAGHRLHIVDFDASSFHEHDLLWLPHHDRLRSAGRKRKAEHLAGRIAAVHALREVGVRTVPGIGDKRQPLWPDGLFGSISHCATTALAVISQQRIGIDIEKIMSQHTATELAPSIIDSDERQILQASSLPFPLALTLAFSAKESVYKAFSDRVTLPGFDSAKVTSLTTTHISLHLLPAFAAMMAERTVRTEWFQRSNSVITLVSAITRFPHDRSAPASILSAIPR

SEQ ID NO: 93101 - protein, 1294 aa, Salmonella enterica
  misc_feature (1)..(1294): tr|A0A4S3IM00|A0A4S3IM00_SALET Enterobactin non-ribosom al peptide synthetase EntF OS=Salmonella enterica I OX= 59201 GN=entF PE=4 SV=1
MTQRLPLVAAQPGIWMAEKLSDLPSAWSVAHYVELNGELDAALLAKAVAVGMQQADTLRMRFTEENGEVWQWIDPEHTFGEPPIADLRDQPDPHHAALALMQADLRQNLRADSGKPLAFHQLIRIDDTRWYWYQRYHHLLVDGFSFPAITRQIAAIYRAWQSDAPTPESPFTPFADVVEEYQRYRQSEAWQRDGAFWAQQRRELPPPASMSAAPLPGRSASADILRMKLSAPAGAFRQLAAHMPEIPRADLALALVTLWLGRLCGRMDYAAGFIFMRRMGSAALTATGPVLNVLPLAVNLHATEDLPTLAKRLAAQLKKMRRHQRYDAEQIVRDSGRAAGETPLFGPVLNIKVFDYHLDLPGIQAQTHTLATGPVNDLELALFPDENGGLDIELLANAQRYDDATLSRHALRLMALITQFADNPALRCGDAQMLLAEEQTQLAHLNNTAVTIPAATLSDLVAQQAQKTPEASALADAHYHFTYREMREQVVALAYALRERGVQPGDSVAVALPRSVFLTLALHGIVEAGAAWLPLDTGYPDDRLRMMLEDAQPKLLITTQAQLARFHDIPGMEYLCYSQPLPVSDATPLRLSLPHHTAYIIFTSGSTGRPKGVMVGQTAIVNRLLWMQDHYPLTADDVVAQKTPCSFDVSVWEFFWPFIAGAKLVMAEPEAHRDPLAMQRFFAQYGVTTTHFVPSMLAAFIASLTPASAGKSCASLKRVFCSGEALPTALCREWETLTNAPLHNLYGPTEAAVDVSWYPACGDELAAVDGNSIPIGYPVWNTGLRILDAHMQPVPPGVAGDLYLTGIQLAQGYLGRPDLTASRFIADPFAPGERMYRTGDVARWLDSGAVEYLGRSDDQLKIRGQRIELGEIDRVMQTLPDVEQAVAHACVFNQAAATGGDARQLVGYLVSHSGLPLDLPALQEKLRQKLPAHMVPVVLLQLASLPLSANGKLDRKALPLPDLAPRVKGRAPQSATEIAVAAAFSRLLGCEINDVESDFFALGGHSLLAMKLAAQLSQTFNRQVTPGQVMVASDVAQLSKLLDTDDDERSRNLGFGPLLPLRESDGPTLFCFHPASGFAWQFSVLSRYLSPSWSIMGIQSPRPAGPMQTATTLDEVCEHHLATLLARQPHGPYYLLGYSLGGTLAQGIAARLRARGETVAFLGLLDTWPPETQNWREKEANGLNPDVLAEIERERAAFVAAQQGNASDALFTAIEGNYADAVRLLTTAHSVPFDGHATLFVADKTVPEGVSPEQSWSPWIASLAIYRQPCAHVDIISPSAFETIGPIISELINK

SEQ ID NO: 93102 - protein, 229 aa, Salmonella enterica
  misc_feature (1)..(229): tr|A0A1S1A5D0|A0A1S1A5D0_SALER Enterobactin synthase su bunit EntD OS=Salmonella enterica OX=28901 GN=entD PE=3 SV=1
MLTSHFSLPFAEHRLHIVDFDASSFHEHDLLWLPHHDRLRSAGRKRKAEHLAGRIAAVHALRKVGVRTAPGIGDKRQPLWPDGVFGSISHCASTALAVISRQRIGVDIEKIMSQHTATELASSIIDSDERQILQASSLPFPLALTLAFSAKESVYKAFSDHATLPGFDSAKITSLTATQISLNLLPAFVTTMAERIVHIGWFQRDNSVITLCSWNDALSPRQERSRFYT

SEQ ID NO: 93103 - protein, 229 aa, Salmonella enterica
  misc_feature (1)..(229): tr|A0A5I3MI27|A0A5I3MI27_SALHO Enterobactin synthase su bunit EntD OS=Salmonella enterica subsp. houtenae str. CFSAN000557 OX=1299292 GN=entD PE=4 SV=1
MLTSHSSLPFAEHRLHIVDFAASSFHEHDLLWLPHHDRLRSAGRKRKAEHLAGRIAAVHALREVGVRTTPGIGDKRQPLWPDGVFGSISHCASTALAVISRQRIGVDIEKIMSQHTAIELAPSIIDSDERQILQASQLPFPLALTLAFSAKESVYKAFSDHVTLPGFDSAKITSLTATQISLNLRPTFAATMAERIVRIGWFQRDNSVITLCSWNNALSPRQERSRFYT

SEQ ID NO: 93104 - protein, 229 aa, Salmonella enterica
  misc_feature (1)..(229): tr|A0A5I3P2A6|A0A5I3P2A6_SALER Enterobactin synthase su bunit EntD OS=Salmonella enterica subsp. salamae str. C FSAN000559 OX=1299293 GN=entD PE=4 SV=1
MLTSHFPLPFAEHRLHIVDFDASSFHEHDLLWLPHHDRLRSAGRKRKAEHLAGRIAAVHALREVGVRTAPGIGDKRQPLWPDGIFGSISHCASTALAVISRQRVGVDIEKIMSQHTATELASSIIDSDERQILQASSLPFPLALTLSFSAKESVYKAFSDHVTLPGFDSAKITSLTATQISLNLRPTFAATMAERIVRIGWFQRDNSVITLCSWNNALSPRQERSRFYT

SEQ ID NO: 93105 - protein, 1294 aa, Salmonella enteritidis
  misc_feature (1)..(1294): tr|A0A1R2PWS9|A0A1R2PWS9_SALEN Amino acid adenylation O S=Salmonella enteritidis OX=149539 GN=entF PE=4 SV=1
MTQRLPLVAAQPGIWMAEKLSDLPSAWSVAHYVELNGELDAALLAKAVAVGMQQADTLRMRFTEENGEVWQWIDPEHTFGEPPIADLRDHPDPHHAALALMQADLRQNLRADSGKPLAFHQLIRIDDTRWYWYQRYHHLLVDGFSFPAITRQIAAIYRAWQSDAPTPESPFTPFADVVEEYQRYRQSEAWQRDGAFWAQQRRELPPPASMSAAPLPGRSASADILRMKLNAPAGAFRQLAAHMPEIPRADLALALVTLWLGRLCGRMDYAAGFIFMRRMGSAALTATGPVLNVLPLAINLHATEDLPTLAKRLAAQLKKMRRHQRYDAEQIVRDSGRAAGETPLFGPVLNIKVFDYHLDLPGIQAQTHTLATGPVNDLELALFPDENGGLDIELLANAQRYDDATLSRHALRLMALITQFADNPALRCGDAQMLLAEEQTQLAHLNNTAVTIPAATLSDLVAQQAQKTPEASALADAHYHFTYREMREQVVALAYALRERGVQPGDSVAVALPRSVFLTLALHGIVEAGAAWLPLDTGYPDDRLRMMLEDAQPKLLITTQAQLARFHDIPGMEYLCYSQPLPVSDATPLGLSLPHHTAYIIFTSGSTGRPKGVMVGQTAIVNRLLWMQAHYPLTADDVVAQKTPCSFDVSVWEFFWPFIAGAKLVMAEPEAHRDPLAMQRFFAQYGVTTTHFVPSMLAAFIASLTPASAGKSCASLTRVFCSGEALPTALCREWETLTNAPLHNLYGPTEAAVDVSWYPACGDELAAVDGNSIPIGYPVWNTGLRILDAHMQPVPPGVAGDLYLTGIQLAQGYLGRPDLTASRFIADPFAPGERMYRTGDVARWLDSGAVEYLGRSDDQLKIRGQRIELGEIDRVMQTLPDVEQAVAHACVFNQAAATGGDARQLVGYLVSHSGLPLDLPALQEKLRQKLPAHMVPVVLLQLAGLPLSANGKLDRKALPLPDLTPRVKGRAPQSATEIAVAAAFSRLLGCEINDVESDFFALGGHSLLAMKLAAQLSQTFNRQVTPGQVMVASDVAQLSKLLDTDDDERSRNLGFGPLLPLRESDGPTLFCFHPASGFAWQFSVLSRYLSPSWSIMGIQSPRPAGPMQTATTLDEVCEHHLATLLARQPHGPYYLLGYSLGGTLAQGIAARLCARGETVAFLGLLDTWPPETQNWREKEANGLNPDVLAEIERERAAFVAAQQGNASDALFTAIEGNYADAVRLLTTAHSVPFDGHATLFVADKTVPEGVSPEQSWSPWIASLAIYRQPCAHVDIISPSAFETIGPIISELINK

SEQ ID NO: 93106 - protein, 234 aa, Salmonella gallinarum
  misc_feature (1)..(234): tr|A0A3V9NJW2|A0A3V9NJW2_SALGL Enterobactin synthase su bunit EntD OS=Salmonella gallinarum OX=594 GN=entD PE=3 SV=1
MLTSHFPPPFAGHRLHIVDFDTSSFREHDLLWLPHHDRLRSAGRKRKAEHLAGRIAAVHALREVGVRTVPGMGDKRQPLWPDGLFGSISHCATTALAVISQQRIGIDIEKIMSQHTATELAPSIIDSDERQILQASSLPFPLALTLAFSAKESVYKAFSDRVTLPGFDSAKVTSLTATHISLHLLPAFAAMMAERTVRTEWFQRSNSVITLVSAITRFPHDRSAPASILSAIPR

SEQ ID NO: 93107 - protein, 234 aa, Salmonella hadar
  misc_feature (1)..(234): tr|A0A3V2W4J3|A0A3V2W4J3_SALHA Enterobactin synthase su bunit EntD OS=Salmonella hadar OX=149385 GN=entD PE=3 S V=1
MRTSHFPLPFAGHRLHIVDFDASSFHEHDLLWLPHHDRLRSAGRKRKAEHLAGRIAAVHALREVGVRTVPGIGDKRQPLWPDGLFGSISHCATTALAVISRQRIGIDIEKIMSQHTATELAPSIIDSDERQILQASSLPFPIALTLAFSAKESVYKAFSDRVTLPGFNSAKVTSLTATHISLHLLPAFAATMTERTVRTEWFQRDNSVITLVSAITRFPHDRSAPASILSAIPR

SEQ ID NO: 93108 - protein, 1294 aa, Salmonella infantis
  misc_feature (1)..(1294): tr|A0A3R0DBC3|A0A3R0DBC3_SALIN Enterobactin non-ribosom al peptide synthetase EntF OS=Salmonella infantis OX=59 5 GN=entF PE=4 SV=1
MTQRLPLVAAQPGIWMAEKLSDLPSAWSVAHYVELNGELDAPLLAKAVAVGMQQADTLRMRFTEENGEVWQWIDPEYTFGEPTIADLRDQPDPHHAALALMQADLRQNLRADSGKPLAFHQLICIDDTRWYWYQRYHHLLVDGFSFPAITRQIAAIYRAWQSDAPTPESPFTPFADVVEEYQRYRQSEAWQRDGAFWAQQRRELPPPASISAAPLPGRSASADILRMKLSAPAGAFRQLAAHMPEIPRADLALALVTLWLGRLCGRMDYAAGFIFMRRMGSAALTATGPVLNVLPLAVNLHATEDLPTLAKRLAAQLKKMRRHQRYDAEQIVRDSGRAAGDTPLFGPVLNIKVFDYHLDLPGIQAHTHTLATGPVNDLELALFPDENGGLDIELLANAQRYDDVTLSRHALRLMALITQFADNPALRCGDAQMLLAEEQTQLAHLNNTAVTIPAATLSDLVAQQAQKTPEASALADAHYHFTYREMREQVVALAYALRERGVQPGDSVAVALPRSVFLTLALHGIVEAGAAWLPLDTGYPDDRLRMMLEDAQPKLLITTQAQLARFHDIPGMEYLCYSQPLPVSDATPLGLSLPHHTAYIIFTSGSTGRPKGVMVGQTAIVNRLLWMQDHYPLTADDVVAQKTPCSFDVSVWEFFWPFIAGAKLVMAEPEAHRDPLAMQRFFAQYGVTTTHFVPSMLAAFIASLTPASAGKSCASLKRVFCSGEALPTALCREWETLTNAPLHNLYGPTEAAVDVSWYPACGDELAAVDGNSIPIGYPVWNTGLRILDAHMQPVPPGVAGDLYLTGIQLAQGYLGRPDLTASRFIADPFAPGERMYRTGDVARWLDSGAVEYLGRSDDQLKIRGQRIELGEIDRVMQTLPDVEQAVAHACVFNQAAATGGDARQLVGYLVSHSGLPLDLPALQEKLRQKLPAHMVPVVLLQLAGLPLSANGKLDRKALPLPDLTPRVKGRAPQSATEIAVAAAFSRLLGCEINDVESDFFALGGHSLLAMKLAAQLSQTFNRQVTPGQVMVASDVAQLSKLLDTDDDERSRNLGFGPLLPLRESDGPTLFCFHPASGFAWQFSVLSRYLSPSWSIMGIQSPRPAGPMQTAATLDEVCEHHLATLLARQPHGPYYLLGYSLGGTLAQGIAARLRARGETVAFLGLLDTWPPETQNWREKEANGLNPDVLAEIERERAAFVAAQQGNASEALFTAIEGNYADAVRLLTTAHSVPFDGHATLFVADKTVPEGVSPEQSWSPWIASLAIYRQPCAHVDIISPSAFETIGPIISELINK

SEQ ID NO: 93109 - protein, 234 aa, Salmonella montevideo
  misc_feature (1)..(234): tr|A0A3U8JL26|A0A3U8JL26_SALMO Enterobactin synthase su bunit EntD OS=Salmonella montevideo OX=115981 GN=entD P E=3 SV=1
MRTSHFPLPFAGHRLHIVDFDASSFHEHDLLWLPHHDRLRSAGRKRKAEHLAGRIAAVHALREVGVRTVPGIGDKRQPLWPDGLFGSISHCASTALAVISRQRIGIDIEKIMSQHTATELAPSIIDSDEHQILQASSLPFPLALTLAFSAKESVYKAFSDRVTLPGFDSAKVTSLTATHISLHLLPAFAATMAERTVRTEWFQRDNSVITLVSAITRFPHDRSAPASILSAIPR

SEQ ID NO: 93110 - protein, 1294 aa, Salmonella moscow
  misc_feature (1)..(1294): tr|A0A5H7LHR2|A0A5H7LHR2_SALMC Enterobactin non-ribosom al peptide synthetase EntF OS=Salmonella moscow OX=2814 6 GN=entF PE=4 SV=1
MTQRLPLVAAQPGIWMAEKLSDLPSAWSVAHYVELNGELDAALLAKAVAVGMQQADTLRMRFTEENGEVWQWIDPEHTFGEPPIADLRDHPDPHHAALALMQADLRQNLRADSGKPLAFHQLIRIDDTRWYWYQRYHHLLVDGFSFPAITRQIAAIYRAWQSDAPTPESPFTPFADVVEEYQRYRQSEAWQRDGAFWAQQRRELPPPASMSAAPLPGRSASADILRMKLNAPAGAFRQLAAHMPEIPRADLALALVTLWLGRLCGRMDYAAGFIFMRRMGSAALTATGPVLNVLPLAINLHATEDLPTLAKRLAAQLKKMRRHQRYDAEQIVRDSGRAAGETPLFGPVLNIKVFDYHLDLPGIQAQTHTLATGPVNDLELALFPDENGGLDIELLANAQRYDDATLSRHALRLMALITQFADNPALRCGDAQMLLAEEQTQLAHLNNTAVTIPAATLSDLVAQQAQKTPEASALADAHYHFTYREMREQVVALAYALRERGVQPGDSVAVALPRSVFLTLALHGIVEAGAAWLPLDTGYPDDRLRMMLEDAQPKLLITTQAQLARFHDIPGMEYLCYSQPLPVSDATPLGLSLPHHTAYIIFTSGSTGRPKGVMVEQTAIVNRLLWMQAHYPLTADDVVAQKTPCSFDVSVWEFFWPFIAGAKLVMAEPEAHRDPLAMQRFFAQYGVTTTHFVPSMLAAFIASLTPASAGKSCASLTRVFCSGEALPTALCREWETLTNAPLHNLYGPTEAAVDVSWYPACGDELAAVDGNSIPIGYPVWNTGLRILDAHMQPVPPGVAGDLYLTGIQLAQGYLGRPDLTASRFIADPFAPGERMYRTGDVARWLDSGAVEYLGRSDDQLKIRGQRIELGEIDRVMQTLPDVEQAVAHACVFNQAAATGGDARQLVGYLVSHSGLPLDLPALQEKLRQKLPAHMVPVVLLQLAGLPLSANGKLDRKALPLPDLTPRVKGRAPQSATEIAVAAAFSRLLGCEINDVESDFFALGGHSLLAMKLAAQLSQTFNRQVTPGQVMVASDVAQLSKLLDTDDDERSRNLGFGPLLPLRESDGPTLFCFHPASGFAWQFSVLSRYLSPSWSIMGIQSPRPAGPMQTATTLDEVCEHHLATLLARQPHGPYYLLGYSLGGTLAQGIAARLCARGETVAFLGLLDTWPPETQNWREKEANGLNPDVLAEIERERAAFVAAQQGNASDALFTAIEGNYADAVRLLTTAHSVPFDGHATLFVADKTVPEGVSPEQSWSPWIASLAIYRQPCAHVDIISPSAFETIGPIISELINK

SEQ ID NO: 93111 - protein, 1294 aa, Salmonella muenchen
  misc_feature (1)..(1294): tr|A0A4Z9NCN1|A0A4Z9NCN1_SALMU Enterobactin non-ribosom al peptide synthetase EntF OS=Salmonella muenchen OX=59 6 GN=entF PE=4 SV=1
MTQRLPLVAAQPGIWMAEKLSDLPSAWSVAHYVELNGELDAALLAKAVAVGMQQADTLRMRFTEENGEVWQWIDPEHTFGEPPIADLRDQPDPHHAALALMQADLRQNLRADSGKPLAFHQLIRIDDTRWYWYQRYHHLLVDGFSFPAITRQIAAIYHAWQSDAPTPESPFTPFADVVEEYQRYRQSEAWQRDGAFWAQQRRELPPPASISAAPLPGRSASAGILRMKLSAPAGAFRQLAAHMPEIPRADLALALVTLWLGRLCGRMDYAAGFIFMRRMGSAALTATGPVLNVLPLAVNLHATEDLPTLAKRLAAQLKKMRRHQRYDAEQIVRDSGRAAGETPLFGPVLNIKVFDYYLDLPGIQAQTHTLATGPVNDLELALFPDENGGLDIELLANAQRYDDATLSRHALRLMALITQFADNPALRCGDAQMLLAEEQTQLTHLNNTAVTIPAATLSDLVAQQAQKTPEASALADAHYHFTYREMREQVVALAYALRERGVQPGDSVAVALPRSVFLTLALHGIVEAGAAWLPLDTGYPDDRLRMMLEDAQPKLLITTQAQLARFHDIPGMEYLCYSQPLPVSDATPLGLSLPHHTAYIIFTSGSTGRPKGVMVGQTAILNRLLWMQDHYPLTADDVVAQKTPCSFDVSVWEFFWPFIAGAKLVMAEPEAHRDPLAMQRFFAQYGVTTTHFVPSMLAAFIASLTPASAGKSCASLKRVFCSGEALPTALCREWETLTNAPLHNLYGPTEAAVDVSWYPACGDELAAVDGNSIPIGYPVWNTGLRILDAHMQPVPPGVAGDLYLTGIQLAQGYLGRPDLTASRFIADPFAPGERMYRTGDVARWLDSGAVEYLGRSDDQLKIRGQRIELGEIDRVMQTLPDVEQAVAHACVFNQAAATGGDARQLVGYLVSHSGLPLDLPALQEKLRQKLPAHMVPVVLLQLAGLPLSANGKLDRKALPLPDLTPRVKGRAPQSATEIAVAAAFSRLLGCEINDVESDFFALGGHSLLAMKLAAQLSQTFNRQVTPGQVMVASDVAQLSKLLDTDDDERSRNLGFGPLLPLRESDGPTLFCFHPASGFAWQFSVLSRYLSPSWSIMGIQSPRPAGPMQTATTLDEVCEHHLATLLARQPHGPYYLLGYSLGGTLAQGIAARLCARGETVAFLGLLDTWPPETQNWREKEANGLNPDVLAEIERERAAFVAAQEGNASEALFTAIEGNYADAVRLLTTAHSVPFDGHATLFVADKTVPEGVSPEQSWSPWIASLAIYRQPCAHVDIISPSAFETIGPIISELINK

SEQ ID NO: 93112 - protein, 1294 aa, Salmonella muenster
  misc_feature (1)..(1294): tr|A0A5I5MMR4|A0A5I5MMR4_SALMS Enterobactin non-ribosom al peptide synthetase EntF OS=Salmonella muenster OX=82 689 GN=entF PE=4 SV=1
MTQRLPLVAAQPGIWMAEKLSDLPSAWSVAHYVELNGELDVPLLAKAVAVGMQQADTLRMRFTEESGEVWQWIDPEHTFGEPPIADLRDQPDPHHAALTLMQADLRQNLRADSGKPLAFHHLIRIDDTRWYWYQRYHHLLVDGFSFPAITRQIAAIYRAWQSEAPTPESPFTPFADVVEEYQRYRQSEAWQRDGAFWAQQRRELPPPASISAAPLPGRSASADILRMKLSAPEGAFRQLVAHMPEIPRADLALALVTLWLGRLCGRMDYAAGFIFMRRMGSAALTATGPVLNVLPLAVNLHATEDLPTLAKRLAAQLKKMRRHQRYDAEQIVRDSGRAAGETPLFGPVLNIKVFDYHLDLPGIQAQTHTLATGPVNDLELALFPDENGGLDIELLANAQRYDDATLSRHALRLMALITQFADNPALRCGDAQMLLAEEQTQLTHLNNTAVTIPAATLSDLVAQQAQKTPEAFALADAHYRFTYREMREQVVALAYALRERGVQPGDSVAVALPRSVFLTLALHGIVEAGAAWLPLDTGYPDDRLRMMLEDAQPKLLITTQAQLARFHDIPGMEYLCYSQPLPVSDATSLGLSLPHHTAYIIFTSGSTGRPKGVMVGQTAIVNRLLWMQDHYPLTADDVVAQKTPCSFDVSVWEFFWPFIAGAKLVMAEPEAHRDPLAMQRFFAQYGVTTTHFVPSMLAAFIASLTPASAGKSCASLKRVFCSGEALPTALCREWETLTNAPLHNLYGPTEAAVDVSWYPACGDELAAVDGNSIPIGYPVWNTGLRILDAHMQPVPPGVAGDLYLTGIQLAQGYLGRPDLTASRFIADPFAPGERMYRTGDVARWLDSGAVEYLGRSDDQLKIRGQRIELGEIDRVMQTLPDVELAVAHACVFNQAAATGGDARQLVGYLVSHSGLPLDLPALQEKLRQKLPAHMVPVVLLQLASLPLSANGKLDRKALPLPDLTPRVKGRAPQSATEIAVAAAFSRLLGCKINDVESDFFALGGHSLLAMKLAAQLSQTFNRQVTPGQVMVASDVAQLSKLLDTDDDERSRNLGFGPLLPLRESDGPTLFCFHPASGFAWQFSVLSRYLSPSWSIMGIQSPRPAGPMQTATTLDEVCEHHLATLLARQPHGPYYLLGYSLGGTLAQGIAARLRARGETVAFLGLLDTWPPETQNWREKEANGLNPDVLAEIERERAAFVAAQQGNASEALFTAIEGNYADAVRLLTTAHSVPFDGHATLFVADKTVPEGVSPEQSWSPWIASLAIYRQPCAHVDIISPSAFETIGPIISELINK

SEQ ID NO: 93113 - protein, 1294 aa, Salmonella newport
  misc_feature (1)..(1294): tr|A0A4U7XPP0|A0A4U7XPP0_SALNE Enterobactin non-ribosom al peptide synthetase EntF OS=Salmonella newport OX=108 619 GN=entF PE=4 SV=1
MTQRLPLVAAQPGIWMAEKLSDLPSAWSVAHYVELNGELDAPLLAKAVAVGMQQADTLRMRFTEENGEVWQWIDPEHTFGEPTIADLRDQPDPHHAALALMQADLRQNLRADSGKPLAFHQLIRIDDTRWYWYQRYHHLLVDGFSFPAITRQIAAIYRAWQSDAPTPESPFTPFADVVEEYQRYRQSEVWQRDGAFWAQQRRELPPPASISAAPLPGRSASADILRMKLSAPAGAFRQLAAHMPEIPRADLALALVTLWLGRLCGRMDYAAGFIFMRRMGSAALTATGPVLNVLPLAVNLHATEDLPTLAKRLAAQLKKMRRHQRYDAEQIVRDSGRAAGETPLFGPVLNIKVFDYYLDLPGIQAQTHTLATGPVNDLELALFPDENGGLDIELLANAQRYDDATLSRHALRLMALITQFADNPALRCGDAQMLLAEEQTQLTHLNNTAVTIPAATLSDLVAQQAQKTPEASALADAHYHFTYREMREQVVALAYALRERGVQPGDSVAVALPRSVFLTLALHGIVEAGAAWLPLDTGYPDDRLRMMLEDAQPKLLITTQAQLARFHDIPGMEYLCYSQPLPVSDATPLRLSLPHHTAYIIFTSGSTGRPKGVMVGQTAIVNRLLWMQDHYPLTADDVVAQKTPCSFDVSVWEFFWPFIAGAKLVMAEPEAHRDPLAMQRFFAQYGVTTTHFVPSMLAAFIASLTPASAGKSCASLTRVFCSGEALPTALCREWETLTNAPLHNLYGPTEAAVDVSWYPACGDELAAVDGNSIPIGYPVWNTGLRILDAHMQPVPPGVAGDLYLTGIQLAQGYLGRPDLTASRFIADPFAPGERMYRTGDVARWLDSGAVEYLGRSDDQLKIRGQRIELGEIDRVMQTLPDVEQAVAHACVFNQAAATGGDARQLVGYLVSHSGLPLDLPALQEKLRQKLPAHMVPVVLLQLAGLPLSANGKLDRKALPLPDLTPRVKGRAPQSATEIAVAAAFSRLLGCEINDVESDFFALGGHSLLAMKLAAQLSQTFNRQVTPGQVMVASDVAQLSKLLDTDDDERSRNLGFGPLLPLRESDGPTLFCFHPASGFAWQFSVLSRYLSPSWSIMGIQSPRPAGPMQTATTLDEVCEHHLATLLARQPHGPYYLLGYSLGGTLAQGIAARLCARGETVAFLGLLDTWPPETQNWREKEANGLNPDVLAEIERERAAFVAAQQGNASEALFTAIEGNYADAVRLLTTAHSVPFDGHATLFVADKTVPEGVSPEQSWSPWIASLAIYRQPCAHVDIISPSAFETIGPIISELINK

SEQ ID NO: 93114 - protein, 1294 aa, Salmonella oranienberg
  misc_feature (1)..(1294): tr|A0A5I3WDL5|A0A5I3WDL5_SALON Enterobactin non-ribosom al peptide synthetase EntF OS=Salmonella oranienberg OX =28147 GN=entF PE=4 SV=1
MTQRLPLVAAQPGIWMAEKLSDLPSAWSVAHYVELNGELDAPLLAKAVAVGMQQADTLRMRFTEESGEVWQWIDPEHTFGEPPIADLRDQPDPHHAALTLMQADLRQNLRADSGKPLAFHQLIRIDDTRWYWYQRYHHLLVDGFSFPAITRQIAAIYRAWQSEAPTPESPFTPFADVVEEYQRYRQSEAWQRDGAFWAQQRRELPPPASMSAAPLPGRSASADILRMKLSAPEGAFRQLAAHMPEIPRADLALALVTLWLGRLCGRMDYAAGFIFMRRMGSAALTATGPVLNVLPLAVNLHATEDLPTLAKRLAAQLKKMRRHQRYDAEQIVRDSGRAAGETPLFGPVLNIKVFDYHLDLPGIQAQTHTLATGPVNDLELALFPDENGGLDIELLANAQRYDDATLSRHALRLMALITQFADNPALRCGDAQMLLAEEQTQLTHLNNTAVTIPAATLSDLVAQQAQKTPEAAALADAHYHFTYREMREQVVALAYALRERGVQPGDSVAVALPRSVFLTLALHGIVEAGAAWLPLDTGYPDDRLRMMLEDAQPKLLITTQAQLARFHDIPGMEYLCYSQPLPVSDATPLGLSLPHHTAYIIFTSGSTGRPKGVMVGQTAIVNRLLWMQDHYPLTADDVVAQKTPCSFDVSVWEFFWPFIAGAKLVMAEPEAHRDPLAMQRFFAQYGVTTTHFVPSMLAAFIASLTPASAGKSCASLKRVFCSGEALPTALCREWETLTNAPLHNLYGPTEAAVDVSWYPACGDELAAVDGNSIPIGYPVWNTGLRILDAHMQPVPPGVAGDLYLTGIQLAQGYLGRPDLTASRFIADPFAPGERMYRTGDVARWLDSGAVEYLGRSDDQLKIRGQRIELGEIDRVMQTLPDVEQAVAHACVFNQAAATGGDARQLVGYLVSHSGLPLDLPALQEKLRQKLPAHMVPVVLLQLASLPLSANGKLDRKALPLPDLTPRVKGRAPQSATEIAVAAAFSRLLVCEINDVESDFFALGGHSLLAMKLAAQLSQTFNRQVTPGQVMVASDVAQLSKLLDTDDDERSRNLGFGPLLPLRESDGPTLFCFHPASGFAWQFSVLSRYLSPSWSIMGIQSPRPAGPMQTATTLDEVCEHHLATLLARQPHGPYYLLGYSLGGTLAQGIAARLRARGETVAFLGLLDTWPPETQNWREKEANGLNPDVLAEIERERAAFVAAQQGNASEALFTAIEGNYADAVRLLTTAHSVPFDGHATLFVADKTVPEGVSPEQSWSPWIASLAIYHQPCAHVDIISPSAFETIGPIISELINK

SEQ ID NO: 93115 - protein, 1294 aa, Salmonella paratyphi
  misc_feature (1)..(1294): tr|A0A5J2CK01|A0A5J2CK01_SALPT Enterobactin non-ribosom al peptide synthetase EntF OS=Salmonella paratyphi A OX =54388 GN=entF PE=4 SV=1
MTQRLPLVAAQPGIWMAEKLSDLPSAWSVAHYVELNGELDAPLLAKAVAVGMQQADTLRMRFTEENGEVWQWIDPEHTFGEPPIADLRDQPDPHHAALALMQADLRQNLRADSGKPLAFHQLIRIDDTRWYWYQRYHHLLVDGFSFPAITRQIAAIYRAWQSDAPTPESPFTPFADVVEEYQRYRQSEAWQRDGAFWAQQRRELPPPASISAAPLPGRSASAGILRMKLSAPAGAFRQLAAHMPEIPRADLALALVTLWLGRLCGRMDYAAGFIFMRRMGSAALTATGPVLNVLPLAVNLHATEDLPTLAKRLAAQLKKMRRHQRYDAEQIVRDSGRAAGETPLFGPVLNIKVFDYHLDLPGIQAQTHTLATGPVNDLELALFPDENGGLDIELLANAQRYDDATLSRHALRLMALITQFADNPALCCGDAQMLLAEEQTQLTHLNNTAVTIPAATLSDLVAQQAQKTPEASALADAHYHFTYREMREQVVALAYALRERGVQPGDSVAVALPRSVFLTLALHGIVEAGAAWLPLDTGYPDDRLRMMLEDAQPKLLITTQAQLARFHDIPGMEYLCYSQPLPVSDATPLGLSLPHHTAYIIFTSGSTGRPKGVMVGQTAIVNRLLWMQDHYPLTADDVVAQKTPCSFDVSVWEFFWPFIAGAKLVMAEPEAHRDPLAMQRFFAQYGVTTTHFVPSMLAAFIASLTPASAGKSCASLKRVFCSGEALPTALCREWETLTNAPLHNLYGPTEAAVDVSWYPACGDELAAVDGNSIPIGYPVWNTGLRILDAHMQPVPPGVAGDLYLTGIQLAQGYLGRPDLTASRFIADPFAPGERMYRTGDVARWLDSGAVEYLGRSDDQLKIRGQRIELGEIDRVMQTLPDVEQAVAHACVFNQAAATGGDARQLVGYLVSHSGLPLDLPALQEKLRQKLPAHMVPVVLLQLTSLPLSANGKLDRKALPLPDLTPRVKGRAPQSATEIAVAAAFSRLLGCEINDVESDFFALGGHSLLAMKLAAQLSQTFNRQVTPGQVMVASDVAQLSKLLDTDDDERSRNLGFGPLLPLRESDGPTLFCFHPASGFAWQFSVLSRYLSPSWSIMGIQSPCPAGPMQTATTLDEVCEHHLATLLARQPNGPYYLLGYSLGGTLAQGIAARLRAHGETVAFLGLLDTWPPETQNWREKEANGLNPDVLAEIERERAAFVAAQQGNASDALFTAIEGNYADAVRLLTTAHSVPFDGHATLFVADKTVPEGVSPEQSWSPWIASLAIYRQPCAHVDIISPSAFETIGPIISELINK

SEQ ID NO: 93116 - protein, 1294 aa, Salmonella potsdam
  misc_feature (1)..(1294): tr|A0A5H6C651|A0A5H6C651_SALPO Enterobactin non-ribosom al peptide synthetase EntF OS=Salmonella potsdam OX=597 GN=entF PE=4 SV=1
MTQRLPLVAAQPGIWMAEKLSDLPSAWSVAHYVELNGELDVALLAKAVAVGMQQADTLRMRFTEENGEVWQWIDPEHTFGEPPIADLRDQPDPHHAALALMQADLRQNLRADSGKPLAFHQLIRIDDTRWCWYQRYHHLLVDGFSFPAITRQIAAIYRAWQSDAPTPESPFTPFADVVEEYQRYRQSEAWQRDGAFWAQQRRELPPPASISAAPLPGRSASADILRMKLSAPAGAFRQLAAHMPEIPRADLALALVTLWLGRLCGRMDYAAGFIFMRRMGSAALTATGPVLNVLPLAVNLHATEDLPTLAKRLAAQLKKMRRHQRYDAEQIVRDSGRAAGETPLFGPVLNIKVFDYHLDLPGIQAQTHTLATGPVNDLELALFPDENGGLDIELLANAQRYDDATLSRHALRLMALITQFADNPALRCGDAQMLLAEEQTQLTHLNNTAVTIPAATLSDLVAQQAQKTPEASALADAHYHFTYREMREQVVALAYALRERGVQPGDSVAVALPRSVFLTLALHGIVEAGAAWLPLDTGYPDDRLRMMLEDAQPKLLITTQAQLARFHDIPGMEYLCYSQPLPASDTTPLGLSLPHHTAYIIFTSGSTGRPKGVMVGQTAIVNRLLWMQDHYPLTADDVVAQKTPCSFDVSVWEFFWPFIAGAKLVMAEPEAHRDPLAMQRFFAQYGVTTTHFVPSMLAAFIASLTPASAGKSCASLKRVFCSGEALPTALCREWETLTNAPLHNLYGPTEAAVDVSWYPACGDELAAVDGNSIPIGYPVWNTGLRILDAHMQPVPPGVAGDLYLTGIQLAQGYLGRPDLTASRFIADPFAPGERMYRTGDVARWLDPGAVEYLGRSDDQLKIRGQRIELGEIDRVMQTLPDVEQAVAHACVFNQAAATGGDARQLVGYLVSHSGLPLDLPALQEKLRQKLPAHMVPVVLLQLAGLPLSANGKLDRKALPLPDLTPRVKGRAPQSATEIAVAAAFSRLLGCEINDVESDFFALGGHSLLAMKLAAQLSQTFNRQVTPGQVMVASDVAQLSKLLDTDDDERSRNLGFGPLLPLRESDGPTLFCFHPASGFAWQFSVLSRYLSPSWSIMGIQSPRPAGPMQTATTLDEVCEHHLATLLARQPHGPYYLLGYSLGGTLAQGSAARLCARGETVAFLGLLDTWPPETQNWREKEANGLNPDVLAEIERERAAFVAAQQGNASDALFTAIEGNYADAVRLLTTAHSVPFDGHATLFVADKTVPEGVSPEQSWSPWIASLAIYRQPCAHVDIISPSAFETIGPIISELINK

SEQ ID NO: 93117 - protein, 1294 aa, Salmonella rubislaw
  misc_feature (1)..(1294): tr|A0A5H8TRF2|A0A5H8TRF2_SALRU Enterobactin non-ribosom al peptide synthetase EntF OS=Salmonella rubislaw OX=59 8 GN=entF PE=4 SV=1
MTQRLPLVAAQPGIWMAEKLSDLPSAWSVAHYVELNGELDAPLLAKAVAVGMQQADTLRMRFTEENGEVWQWIDPERTFGEPPIADLRDQPDPHHAALTLMQADLRQNLRADSGKPLAFHQLIRIDDTRWYWYQRYHHLLVDGFSFPAITRQIAAIYRAWQSEAPTPESPFTPFADVVEEYQRYRQSEAWQRDGAFWAQQRRELPPPASMSAAPLPGRSASADILRMKLSAPAGAFRQLVAHMPEIPRADLALALVTLWLGRLCGRMDYAAGFIFMRRMGSAALTATGPVLNVLPLAVNLHATEDLPTLAKRLAAQLKKMRRHQRYDAEQIVRDSGRAAGETPLFGPVLNIKVFDYHLDLPGIQAQTHTLATGPVNDLELALFPDENGGLDIELLANAQRYDDATLSRHALRLMALITQFADNPALRCGDAQMLLAEEQTQLTHLNNTAVTIPAATLSDLVAQQAQKTPEAAALADAHYHFTYREMREQVVALAYALRERGVQPGDSVAVALPRSVFLTLALHGIVEAGAAWLPLDTGYPDDRLRMMLEDAQPKLLITTQAQLARFHDIPGMEYLCYSQPLPVSDATPLGLSLPHHTAYIIFTSGSTGRPKGVMVGQTAIVNRLLWMQDHYPLTADDVVAQKTPCSFDVSVWEFFWPFIAGAKLVMAEPEAHRDPLAMQRFFAQYGVTTTHFVPSMLAAFIASLTPASAGKSCASLKRVFCSGEALPTALCREWETLTNAPLHNLYGPTEAAVDVSWYPACGDELAAVDGNSIPIGYPVWNTGLRILDAHMQPVPPGVAGDLYLTGIQLAQGYLGRPDLTASRFIADPFAPGERMYRTGDVARWLDSGAVEYLGRSDDQLKIRGQRIELGEIDRVMQTLPDVEQAVAHACVFNQAAATGGDARQLVGYLVSHSGLPLDLPALQEKLRQKLPAHMVPVVLLQLASLPLSANGKLDRKALPLPDLTPRVKGRAPQSATEIAVAAAFSRLLGCEINDVESDFFALGGHSLLAMKLAAQLSQTFNRQVTPGQVMVASDVAQLSKLLDTDDDERSRNLGFGPLLPLRESDGPTLFCFHPASGFAWQFSVLSRYLSPSWSIMGIQSPRPAGPMQTATTLDEVCEHHLATLLARQPHGPYYLLGYSLGGTLAQGIAARLRARGETVAFLGLLDTWPPETQNWREKEANGLNPDVLAEIERERAAFVAAQQGNASEALFTAIEGNYADAVRLLTTAHSVPFDGHATLFVADKTVPEGVSPEQSWSPWIASLAIYRQPCAHVDIISPSAFETIGPIISELINK

SEQ ID NO: 93118 - protein, 234 aa, Salmonella senftenberg
  misc_feature (1)..(234): tr|A0A401APN9|A0A401APN9_SALSE Enterobactin synthase su bunit EntD OS=Salmonella senftenberg OX=28150 GN=entD P E=3 SV=1
MLTSHFPLPFAGHRLHIVDFDASSFHEHDLLWLPHHDRLRSAGHKRKAEHLAGRIAAVHALREVGVRAVPGIGEKRQPLWPDGLFGSISHCASTALAVISRQRIGIDIEKIMSQHTATELAPSIIDSDERQILQASSLPFPLALTLAFSAKESVYKAFSDCVTLPGFDSAKVTSLTATHISLYLLPAFAATMAERTVHTEWFQRDNSVITLVSAITRFPHDRSAPASILSAIPR

SEQ ID NO: 93119 - protein, 234 aa, Salmonella thompson
  misc_feature (1)..(234): tr|A0A3V4Q887|A0A3V4Q887_SALTH Enterobactin synthase su bunit EntD OS=Salmonella thompson OX=600 GN=entD PE=3 S V=1
MLTSHFPLPFAGHRLHIVDFDASSFHEHDLLWLPHHNRLRSAGRKRKAEHLAGRIAAVHALREVGVRTVPGIGDKRQPLWPDGLFGSISHCATTALAVISRQRIGIDIEKIMSQHTATELAPSIIDSDERQILQASSLPFPLALTLAFSAKESVYKAFSDRVTLPGFDSAKVTSLTATHISLHLLPAFAAMMAERTVRTEWFQRSNSVITLVSAITRFPHDRSAPASILSAIPR

SEQ ID NO: 93120 - protein, 234 aa, Salmonella typhi
  misc_feature (1)..(234): tr|A0A4U8DGH4|A0A4U8DGH4_SALTI Enterobactin synthase co mponent D OS=Salmonella typhi OX=90370 GN=entD PE=3 SV= 1
MLTSHFPLPFAGHRLHIVDFDASSFHEHDLLWLPHHDRLRSAGRKRKAEHLAGRIAAVHALREVGVRAVPGIGDKRQPLWPDGLFGSISHCASTALAVISRQRVGVDIEKIMSQHTATELAPSIIDSDERQILQASSLPFPLALTLAFSAKESVYKAFSDRVTLPGFDSAKITSLNATHISLHLLPAFAAMMAERTVRTEWFQRGNSVITLVSAITRFPHDRSAPASILSAIPR

SEQ ID NO: 93121 - protein, 1294 aa, Salmonella typhimurium
  misc_feature (1)..(1294): tr|A0A5A8VWX5|A0A5A8VWX5_SALTM Enterobactin non-ribosom al peptide synthetase EntF OS=Salmonella typhimurium OX =90371 GN=entF PE=4 SV=1
MTQRLPLVAAQPGIWMAEKLSDLPSAWSVAHYVELNGELDAALLAKAVAVGMQQADTLRMRFTEENGEVWQWIDPEHTFGEPPIADLRDQPDPHHAALALMQADLRQNLRADSGKPLAFHQLIRIDDTRWYWYQRYHHLLVDGFSFPAITRQIAAIYRAWQSDAPTPESPFTPFADVVEEYQRYRQSEAWQRDGAFWAQQRRELPPPASMSAAPLPGRSASADILRMKLSAPAGAFRQLAAHMPEIPRADLALALVTLWLGRLCGRMDYAAGFIFMRRMGSAALTATGPVLNVLPLAVNLHATEDLPTLAKRLAAQLKKMRRHQRYDAEQIVRDSGRAAGETPLFGPVLNIKVFDYHLDLPGIQAQTHTLATGPVNDLELALFPDENGGLDIELLANAQRYDDATLSRHALRLMALITQFADNPALRCGDAQMLLAEEQTQLAHLNNTAVTIPAATLSDLVAQQAQKTPEASALADAHYHFTYREMREQVVALAYALRERGVQPGDSVAVALPRSVFLTLALHGIVEAGAAWLPLDTGYPDDRLRMMLEDAQPKLLITTQAQLARFHDIPGMEYLCYSQPLPVSDATPLRLSLPHHTAYIIFTSGSTGRPKGVMVGQTAIVNRLLWMQDHYPLTADDVVAQKTPCSFDVSVWEFFWPFIAGAKLVMAEPEAHRDPLAMQRFFAQYGVTTTHFVPSMLAAFIASLTPASAGKSCASLKRVFCSGEALPTALCREWETLTNAPLHNLYGPTEAAVDVSWYPACGDELAAVDGNSIPIGYPVWNTGLRILDAHMQPVPPGVAGDLYLTGIQLAQGYLGRPDLTASRFIADPFAPGERMYRTGDVARWLDSGAVEYLGRSDDQLKIRGQRIELGEIDRVMQTLPDVEQAVAHACVFNQAAATGGDARQLVGYLVSHSGLPLDLPALQEKLRQKLPAHMVPVVLLQLASLPLSANGKLDRKALPLPDLAPRVKGRAPQSATEIAVAAAFSRLLGCEINDVESDFFALGGHSLLAMKLAAQLSQTFNRQVTPGQVMVASDVAQLSKRLDTDDDERSRNLGFGPLLPLRESDGPTLFCFHPASGFAWQFSVLSRYLSPSWSIMGIQSPRPAGPMQTATTLDEVCEHHLATLLARQPHGPYYLLGYSLGGTLAQGIAARLRARGETVAFLGLLDTWPPETQNWREKEANGLNPDVLAEIERERAAFVAAQQGNASDALFTAIEGNYADAVRLLTTAHSVPFDGHATLFVADKTVPEGVSPEQSWSPWIASLAIYRQPCAHVDIISPSAFETIGPIISELINK

SEQ ID NO: 93122 - protein, 1294 aa, Salmonella virchow
  misc_feature (1)..(1294): tr|A0A3V4BDZ6|A0A3V4BDZ6_SALVI Enterobactin non-ribosom al peptide synthetase EntF OS=Salmonella virchow OX=484 09 GN=entF PE=4 SV=1
MTQRLPLVAAQPGIWMAEKLSDLPSAWSVAHYVELNGELDAALLAKAVAVGMQQADTLRMRFTEENGEVWQWIDPEHTFGEPPLADLRDHPDPHHAALALMQADLRQNLRADSGKPLAFHQLIRIDDTRWYWYQRYHHLLVDGFSFPAITRQIAAIYRAWQSDAPTPESPFTPFADVVEEYQRYRQSEAWQRDGAFWAQQRRELPPPASMSAAPLPGRSASADILRMKLSAPAGAFRQLAAHMPEIPRADLALALVTLWLGRLCGRMDYAAGFIFMRRMGSAALTATGPVLNVLPLAVNLHATEDLPTLAKRLAAQLKKMRRHQRYDAEQIVRDSGRAAGETPLFGPVLNIKVFDYHLDLPGIQAQTHTLATGPVNDLELALFPDENGGLDIELLANAQRYDDATLSRHALRLMALITQFADNPALRCGDAQMLLAEEQTQLTHLNNTAVTIPAATLSDLVAQQAQKTPEASALADAHYHFTYREMREQVVALAYALRERGVQPGDSVAVALPRSVFLTLALHGIVEAGAAWLPLDTGYPDDRLRMMLEDAQPKLLITTQAQLARFHDIPGMEYLCYSQPLPVSDATPLGLSLPHHTAYIIFTSGSTGRPKGVMVGQTAIVNRLLWMQDHYPLTADDVVAQKTPCSFDVSVWEFFWPFIAGAKLVMAEPEAHRDPLAMQRFFAQYGVTTTHFVPSMLAAFIASLTPASVGKSCASLKRVFCSGEALPTALCREWETLTNAPLHNLYGPTEAAVDVSWYPACGDELAAVDGNSIPIGYPVWNTGLRILDAHMQPVPPGVAGDLYLTGIQLAQGYLGRPDLTASRFIADPFAPGERMYRTGDVARWLDSGAVEYLGRSDDQLKIRGQRIELGEIDRVMQTLPDVEQAVAHACVFNQAAATGGDARQLVGYLVSHSGLPLDLPALQEKLRQKLPAHMVPVVLLQLAGLPLSANGKLDRKALPLPDLTPRVKGRAPQSATEIAVAAAFSRLLGCEINDVESDFFALGGHSLLAMKLAAQLSQTFNRQVTPGQVMVASDVAQLSKLLDTDDDERSRNLGFGPLLPLRESDGPTLFCFHPASGFAWQFSVLSRYLSPSWSIMGIQSPRPAGPMQTATTLDEVCEHHLATLLARQPHGPYYLLGYSLGGTLAQGIAARLCARGETVAFLGLLDTWPPETQNWREKEANGLNPDVLAEIERERAAFVAAQQGNASDALFTAIEGNYADAVRLLTTAHSVPFDGHATLFVADKTVPEGVSPEQSWSPWIASLAIYRQPCAHVDIISPSAFETIGPIISELINK

SEQ ID NO: 93123 - protein, 1293 aa, Shigella boydii
  misc_feature (1)..(1293): tr|A0A3S0P2F9|A0A3S0P2F9_SHIBO Enterobactin non-ribosom al peptide synthetase EntF OS=Shigella boydii OX=621 GN =entF PE=4 SV=1
MSQHLPLVAAQPGIWMAEKLSDLPSAWSVAHYVELTGEVDAPLLARAVVAGLAQADTLRMRFTEDNGEVWQWVDDAQTFELPEIIDLRTNIDPHGTARALMQADLQQDLRVDSGKPLVFHQLIQVADNRWYWYQRYHHLLVDGFSFPAITRQIANIYCAWLRGEPTPASPFTPFADVVEEYQQYRESEAWQRDAAFWAEQRRQLPPPASLSPAPLPGRSASADILRLKLEFTDGEFRQLATQLSGVQRTDLALALVALWLGRLCNRMDYAAGFIFMRRLGSAALTATGPVLNVLPLGIHIEAQETLPQLATRLAAQLKKMRRHQRYDAEQIVRDSGRAAGDEPLFGPVLNIKVFDYQLDIPGVQAQTHTLATGPVNDLELALFPDEHGDLSIEILANKQRYDEPTLIQHAERLKMLIAQFAADPALLCGDVDIMLPGEYVQLAQINATQVEIPETTLSALVAEQAAKTPDAPALADARYQFSYLEMREQVVALANLLRERGVKPGDSVAVALPRSVFLTLALHAIVETGAAWLPLDTGYPDDRLKMMLEDARPSLLITTDDQLPRFADVPDLTSLCYNAPLTPQGSAPLQLSQPHHTAYIIFTSGSTGRPKGVMVGQTAIVNRLLWMQNHYPLTGEDVVAQKTPCSFDVSVWEFFWPFIAGAKLVMAEPEAHRDPLAMQQFFAEYGVTTTHFVPSMLAAFVASLTPQTARQNCATLKQVFCSGEALPADLCREWQQLTSAALHNLYGPTEAAVDVSWYPAFGEELAQVRGSSVPIGYPVWNTGLRILDAIMHPVPPGVAGDLYLTGIQLAQGYLGRPDLTASRFIADPFAPGERMYRTGDVARWLDNGAVEYLGRSDDQLKIRGQRIELGEIDRVMQALPDVEQAVTHACVINQAAATGGDARQLVGYLVSQSGLPLDTTALQAQLRETLPPHMVPVVLLQLPQLPLSANGKLDRKALPLPELKAQAPGRAPKAGSETIIAAAFSSLLGCDVQDADADFFALGGHSLLAMKLAAQLSRQFTRQVTPGQVMVASTVAKLATIIDGEEDSSRRMGFETILPLREGNGPTLFCFHPASGFAWQFSVLSRYLDPQWSIIGIQSPRPHGPMQTAANLDEVCEAHLATLLEQQPHGPYYLLGYSLGGTLAQGIAARLRARGEQVAFLGLLDTWPPETQNWQEKEANGLDPEVLAEINREREAFLAAQQGSTSTDLFTTIEGNYADAVRLLTTAHSVPFEGKATLFVAERTLQEGMNPERAWSPWIAELDIYRQDCAHVDIISPGAFEKIGPIIRATLNR

SEQ ID NO: 93124 - protein, 285 aa, Shigella flexneri; identical to SEQ ID NO: 92339
  misc_feature (1)..(285): sp|P0ADI6|ENTB_SHIFL Enterobactin synthase component B OS=Shigella flexneri OX=623 GN=entB PE=3 SV=1

SEQ ID NO: 93125 - protein, 1297 aa, Shigella flexneri
  misc_feature (1)..(1297): tr|A0A4P7TPC4|A0A4P7TPC4_SHIFM Enterobactin non-ribosom al peptide synthetase EntF OS=Shigella flexneri serotyp e 5a (strain M90T) OX=1086030 GN=entF PE=4 SV=1
MSQHLPLVAAQPGIWMAEKLSDLPSAWSVAHYVELTGEVDAPLLARAVVAGLAQADTLRMRFTEDNGEVWQWVDDALIFELPEIIDLRTNIDPHGTAQALMLADLQQDLRVDSGKPLVFHQLIQVADNRWYWYQRYHHLLVDGFSFPAITRQIANIYCALLRGEPTPASPFTPFADVVEEYQQYRESEAWQRDAAFWVEQRRQLPPPASLSPAPLAGRSASADILRLKMEFTDGEFRQLATQLSGVQRTDLALALTALWLGRLCNRMDYAAGFIFMRRLGSAALTATGPVLNVLSLGIHIAAQETLPELATRLATRLAAQLKKMRRHQRYDAEQIVRDSGRAAGDEPLFGPVLNIKVFDYQLDIPGVQAQTHTLATGPVNGLELALFPDEHGDLSIEILANKQRYDEPTLIQHAERLKMLIAQFAADPALLCGDVDIMLPGEYAQLAQINATQVEIPETTLSALVAEQAAKTPDAPALADARYLFSYREMHEQVVALANLLRERGVKPGDSVAVALPRSVFLTLALHAIVEAGAAWLPLDTGYPDDRLKMMLEDARPSLLITTDDQLPRFSDVPNLTNLCYNAPLTPQGSAPLQLSQPHHTAYIIFTSGSTGRPKGVMVGQTAIVNRLLWMQNHYPLTGEDVVAQKTPCSFDVSVWEFFWPFIAGAKLVMAEPEAHRDPLAMQQFFAEYGVTTTHFVPSMLAAFVASLTPQTARQSCVTLKQVFCSGEALPADLCREWQQLTGAPLHNLYGPTEAAVDVSWYPAFGEELAQVRGSSVPIGYPVWNTGLRILDAMMHPVPPGVAGDLYLTGIQLAQGYLGRPDLTASRFIADPFAPGERMYRTGDVARWLDNGAVEYLGRSDDQLKIRGQRIELGEIDRVMQALPDVKQAVTHACVINQAAATGGDARQLVGYLVSQSGLPLDTSALQAQLRETLPPHMVPVVLLQLPQLPLSANGKLDRKALPLPELKAQAPGRAPKAGSETIIAAAFASLLGCDVQDADADFFALGGHSLLAMKLAAQLSRQFARQVTPGQVMVASTVAKLATIIDGEEDSSRRMGFETILPLREGNGPTLFCFHPASGFAWQFSVLSRYLDPQWSIIGIQSPRPHGPMQTATNLDEVCEAHLATLLEQQPHGPYYLLGYSLGGTLAQGIAARLRARGEQVAFLGLLDTWPPETQNWQEKEANGLDPEVLAEINREREAFLAAQQGSTSTELFTTIEGNYADAVRLLTTAHSVPFDGKATLFVAERTLQEGMSPERAWSPWIAELDIYRQDCAHVDIISPGAFVKIGPIIRATLNR

SEQ ID NO: 93126 - protein, 206 aa, Shigella flexneri; identical to SEQ ID NO: 93068
  misc_feature (1)..(206): tr|A0A5C2EC34|A0A5C2EC34_SHIFL Enterobactin synthase su bunit EntD OS=Shigella flexneri Y OX=424720 GN=entD PE= 3 SV=1

SEQ ID NO: 93127 - protein, 1293 aa, Shigella sonnei
  misc_feature (1)..(1293): tr|A0A0I4Q0I6|A0A0I4Q0I6_SHISO Enterobactin non-ribosom al peptide synthetase EntF OS=Shigella sonnei OX=624 GN =entF PE=4 SV=1
MSQHLPLVAAQPGIWMAEKLSDLPSAWSVAHYVELTGDVDAPLLARAVVAGLAQADTLRMRFTEDNGEVWQWVDDALIFEQPEIIDLRTNIDPHGTAQALMLADLQQDLRVDSGKPLVFHQLIHVADNRWYWYQRYHHLLVDGFSFPAITRQIANIYCTWLRGEPTPASPFTPFADVVEEYQQYRESEAWQRDAAFWAEQRRQLPPPASLSPAPLPGRSASADILRLKLEFTDGEFRQLATQLSGVQRTDLALALAALWLGRLCNRMDYAAGFIFMRRLGSAALTASGPVLNVLPLGIHIAAQETLPELATRLAAQLKKMRRHQRYDAEQIVRDSGRAAGDEPLFGPVLNIKVFDYQLDIPGVQAQTHTLATGPVNDLELALFPDEHGDLSIEILANKQRYDEPTLIQHAERLKMLIAQFAADPALLCGDVDIMLPGEYAQLAQINATQVEIPETTLSALVAEQAAKTPDAPALADARYLFSYREMREQVVALANLLRERGVKPGDSVAVALPRSVFLTLALHAIVEAGAAWLPLDTGYPDDRLKMMLEDARPSLLITTDDQLPRFSDVPNLTSLCYNAPLTPQGSAPLQLSQPHHTAYIIFTSGSTGRPKGVMVGQTAIVNRLLWMQNHYPLTGEDVVAQKTPCSFDVSVWEFFWPFIAGAKLVMAEPEAHRDPLAMQQFFAEYGVTTTHFVPSMLAAFVASLTPQTARQSCATLKQVFCSGEALPADLCREWQQLTGAPLHNLYGPTEAAVDVSWYPAFGEELAQVRGSSVPIGYPVWNMGLRILDAMMHPVPPGVAGDLYLTGIQLAQGYLGRPDLTASRFIADPFAPGERMYRTGDVARWLDNGAVEYLGRSDDQLKIRGQRIELGEIDRVMQALPDVEQAVTHACVINQAAATGGDARQLVGYLVSQSGLPLDTSALQAQLRETLPPHMVPVVLLQLPQLPLSANGKLDRKALPLPELKTQASGRAPKAGSETIIAAAFASLLGCDVQDADADFFALGGHSLLAMKLAAQLSRQFARQVTPGQVMVASTVAKLATIIDGEEDSSRRMGFETILPLREGNGPTLFCFHPASGFAWQFSVLSRYLDPQWSIIGIQSPRPHGPMQTATNLDEVCEAHLATLLEQQPHGPYYLLGYSLGGTLAQGIAARLRARGEQVAFLGLLDTWPPETQNWQEKEANGLDPEVLAEINREREAFLAAQQGSTSTELFTTIEGNYADAVRLLTTAHSVPFDGKATLFVAERTLQEGMSPERAWSPWIAELDIYRQDCAHVDIISPGAFVKIGPIIRATLNR

SEQ ID NO: 93128 - protein, 224 aa, Streptomyces sp.
  misc_feature (1)..(224): tr|A0A2P8AK88|A0A2P8AK88_9ACTN Enterobactin synthase co mponent B OS=Streptomyces sp. 111WW2 OX=1945515 GN=entB PE=4 SV=1
MSYSEEWVTARARDAYEHGRASFDVRPERTALLVIDMQDEFVRPGWSPYWVPAATRMAPRLRRLVEGCRSADVPVIWTIFDDTHLGLDRPRALSHLPHADTDWRRPGPAEVWDQLGRRSDEALIRKPSYGAFYDTPLDTMLRNLGRDTVIVTGTLTNYCCGTTARQAYERGYKVVFGADVTATDDESRQEPELAVLRKGFALVLTAEEITNQLATGARVRHGRH

SEQ ID NO: 93129 - protein, 435 aa, [Actinobacillus] rossii
  misc_feature (1)..(435): tr|A0A380TQV4|A0A380TQV4_9PAST Isochorismate synthase M enF OS=[Actinobacillus] rossii OX=123820 GN=menF PE=3 S V=1
MFGNFAFIFMNGIMFELLADKVNSYKIDAQSPMITAFRVEIAEFGDLLAWLKAQNMFPQYYLNFRDSERRVAALGKVRSFSNEIAAQRFITTTEYPLIGGLTFDKQSHFWLPRLLIEKESKQVSISVFVDNQVDLMQEKRAALNVIETLQNFTALEPLNLGVQLLEQKANQQEWCGWVEKALQAIKTGEFTKVVLANEMHFISEYPINAKDFLAESEKQNTGCYHFLYAENAESTFVGSTPERLFQRQGSLVKTEALAGTALMSDDAQQNQEQADWLLHDQKNDDENLLVVKDICDNLQAFVSDIQVGDVELKQLRRVQHLRRQIQAELKAPFADAACLQAIHPTAAVSGLPQQSALAFLQNTENFDRTWYAGTLGMMTKNQGEFCVTIRCAFIEQNKIRIFAGAGIVAGSVPLLEWQEIERKASGLVTLLNTGK

SEQ ID NO: 93130 - protein, 474 aa, [Brevibacterium] frigoritolerans
  misc_feature (1)..(474): tr|A0A4V3B8P5|A0A4V3B8P5_9BACI Isochorismate synthase M enF OS=[Brevibacterium] frigoritolerans OX=450367 GN=me nF PE=3 SV=1
MITALKHTFTEIMKRALEEARQFDKPVILSQVKPLNDSMNPLHFYAAGERLFLGERFYWATPGSRFTITGLGNECTVENDSAESDRFGRIESDWKRFKKMVHYEDGAKSHIGTGALLFGGFSFDPHNRRNERWNKYPEAKFFLPSVMLTVKDGVSFLTINRVINPDDDLESCAKHFTSIAGEVLTEKASTGGESVNNYTLKEADTGTWLSAVQKATELIKSGELDKVVLAREVQLEYDHKINIYSTLSKLQTEQPTSFIFSFENGRQSFIGATPERLIKKENSRLLSTCLAGSIKRGKSKQEDTELGTELLNDEKNLIEHAIVVKMIKDSFEEYCSKVKVSDHPQLLKTKNIQHLYTPIEGSMKAGYSLLNLVEKLHPTPALGGYPKMAAVDIIREIEPMDRGWYAGPVGWLDAENNGEFAVAIRSGLIEGKQAILFAGCGIVAESDPQMEYQETLIKLKPMLSALGGVNHECK

SEQ ID NO: 93131 - protein, 450 aa, [Clostridium] indolis
  misc_feature (1)..(450): tr|A0A3P6KEZ9|A0A3P6KEZ9_9FIRM Isochorismate synthase f amily protein OS=[Clostridium] indolis OX=69825 GN=entC PE=4 SV=1
MTLDVKESEIVEAVYESNQTWVSVEAKLDYELDPTILFHVTEDCAGDRFYFKKNDNETSFFGYHAIKRFKNDFENKQSIFREWEKYKNDIELIHPSSEKHHLKICGGFQFSSHKSGDEWREFGINHFVLPEVLVTMEQGKTFITYTVESENFEIDAFLAIIDKLTQKDIQLNDKIGDIKRIDDIYKDEWRDLVKDTIDILDENKKIVLARKRLIIFDKNVNISYILNRAIQGEHNSYLFVLESQDSVFFSQTPEQLMEVSDDVLSTKAVAGTIKRTHQEEIDKANIDAFLNDEKNLNEHRFVVESILNDIKPYVEQITFNEKPQILTNDHLYHLYTKIKGRLTKTSYIGLLDNLHPTPALGGYPKDEAISYIEQYEFGTRGLYGAPVGYIDMYDNCEFIVAIRSMLIKKNQATLFAGCGIVHNSDADSEVAETAVKFSPMMKALGVEKYE

SEQ ID NO: 93132 - protein, 392 aa, [Curtobacterium] plantarum
  misc_feature (1)..(392): tr|A0A3M7UGI1|A0A3M7UGI1_9GAMM Isochorismate synthase O S=[Curtobacterium] plantarum OX=221276 GN=EBO33_09675 P E=4 SV=1
MVESLAFEHPLLQDFPALCRGFLFTSPWQSLTTQGCFTTLTAPVKQGEQLTGEFQQQLQHHFASARKQGIAHPILVGAIPFDVDQPAALFIPESYQTFNRDDLNASASLAEAELPQVRRRTAVPDHDIFIDMVAQAVAATQRGDLDKVVLSRLMDIVAEQPVDTAALMQRIVAQNPNSYHFHLPLPDGGALVGASPELMIRKQGRQFSSCPLAGSAPRHRDPQRDQASGDSLMHSAKDRHEHKLVTDAMRATLQPRSRLLSVPETPSLLTTATLWHLATQIQGDVLDDRENALSLACLLHPTPALSGFPHQRAQALIQRLEPFERQLFGGIVGWCDDQGNGEWVVTIRCGTVNGPRVRLFAGAGIVADSQPESEWRETGVKLDTMLRAFGLQ

SEQ ID NO: 93133 - protein, 474 aa, [Flavobacterium] thermophilum
  misc_feature (1)..(474): tr|A0A377G5F2|A0A377G5F2_9BACL Isochorismate synthase M enF OS=[Flavobacterium] thermophilum OX=1414643 GN=entC PE=3 SV=1
MGSRGWRGNFTKESVRIVAIGFQHTLQQQLHELAVRAARPFVSWTESLEGVDPVSFFMQGPSCGFRERFFWSDRSGGTILVGLGSVHAIETGEKDGRFREVDARRRQWASQIERHGDTDAPPLLFGGFSFDPHRTPTDVWRGFSAGKLIAPAVLLSMRNGQAKLTVTLPAGGGGREIEQVGRLLGRIAAPPLPAPLPALVAAREADSGRWMEAVRQAIASIRAGALDKVVLARARQLTFAGTIDAGSVLARLREQQPFAYLFAFEQDGRCLIGASPEQLVQKEGETCRSICLAGSARRGATVEEDERLGAWLLSDRKNRQEHQFVVRMISRLFAEVCEAVEMPDGPQLLKLPHIQHLCTPVVGRGCREPSVLRLVERMHPTPALGGTPRERAMETIRALEPLERGWYAAPIGWVDAYGDGEWAVAIRSALLAGSQAFLFAGCGIVADSDPQSEYEETNVKMAPMLSALGVMHHD

SEQ ID NO: 93134 - protein, 432 aa, [Haemophilus] felis
  misc_feature (1)..(432): tr|A0A1T0BBD9|A0A1T0BBD9_9PAST Isochorismate synthase M enF OS=[Haemophilus] felis OX=123822 GN=menF PE=3 SV=1
MDNLQFIKAQLMAQLETYQVQPEPAITCLKVVTTPSFNLLNWLKAQTSYPQFYLNIRDGSSVWASVGEVCRFEDMTQAEQFVTQQQLPLLGGMQFTGATEFILPRVLLRQNQQQLEVSLFISAQDLASNTTQLKQQILQELQHFERTLPFAPVQQSIQLQRQQADQAQWCNWVEQGLAQIKQGALRKIVLANESVFSTEKTLKGIDFLAESERHNLGCYHFLFAKNANSTFLGSTPELLYRRRAEQLKTEALAGTAFMTQDEALNEQQGQWLLHDPKNEYENQLVVNGICEQLEPFVNHIHIEPVELKKLRKVQHLRRKIQAELKQDAGDKDILKAIHPTAAIAGLPQQAAQKAIQNIENFDRRWYAGTLGYISPEQADFCVTIRSAFIEQQGHQSQLHVFAGAGIVEGSIPLLEWQEIERKATSLVSLLQQ

SEQ ID NO: 93135 - protein, 424 aa, [Pasteurella] mairii
  misc_feature (1)..(424): tr|A0A379B2T6|A0A379B2T6_9PAST Isochorismate synthase M enF OS=[Pasteurella] mairii OX=757 GN=menF PE=3 SV=1
MDSFHFLKKQLIEKINTYQPQREEITVLQSQSVVEVNLLSWLKAQNAYPQFYLKRRDEAQIFVALGKVRSFSDTNSAQQFIETHDFTLIGGLTFDGETLLYLPRLLLLQEKDQLTAHLFIDNRIDWATEKAQLLPLLENLEKTTALLPIQQSIYQHSPTASQVQWCQWVENALQHIQQGHAGKIVLANETLFHTEQPLCAKEVLAESEQYNVGCYHFLLAWDAECSFIGSTPERLYQRDGDQLQTEALAGTAFMSEDEQLNRQQATWLLHDPKNIYENSLVVEDIQQNLHPFSTQIDVSELGIKQLRQVQHLRRPISAKLAKNCGDSVCLQAIHPTAAVAGLPRQAAKQFLQQTETFQRSWYAGTLGFMRQQQAEFCVTIRSAFIEQNKIRVFAGAGIVEGSIPLLEWQEIERKALGLISLLQE

SEQ ID NO: 93136 - protein, 411 aa, [Propionibacterium] humerusii
  misc_feature (1)..(411): tr|E4HM60|E4HM60_9ACTN Isochorismate synthase OS=[Propi onibacterium] humerusii HL044PA1 OX=765109 GN=HMPREF960 7_02004 PE=4 SV=1
MALLRSWLRLESGFVPTLSCSDAISTLPGAEWLAEVLHWVPDGIDPWIWLAPDSDDVPAMVGWGVQRRFVASGHRAVECAWHHMASWANDHVVAFGSFPFSKTQEGFLVVPQVLIARQHLGSPTMVTGDASSLTRRDLYLKPPHIYTSAPAISEAQWTASVKAATRRLREDSELEKVVLARAVDVEADAPVSRTAVASRLASQFPGCWTYSHDGLVGATPELLVDCRDGLFRARVLAGTRKPEWADELLSNLKERREHELAVASVTGKLTEAGLSDATIRGPFRLELPNVVHLATDVTARVNGSNAARIVDAMHPTAAVCGTPREGAYRLIAEVESLDRERFAGPVGWMSSDGSGQWALALRCGQFSDDSRQIRLYAGAGIMPTSDPAKEWLEVGAKMAAFNGCLRQPTDS

SEQ ID NO: 93137 - protein, 459 aa, Acaryochloris marina
  misc_feature (1)..(459): tr|A8ZKD4|A8ZKD4_ACAM1 Isochorismate synthase MenF OS=A caryochloris marina (strain MBIC 11017) OX=329726 GN=me nF PE=3 SV=1
MCLHRKIIDFIVDELKTLAENSQSKIVRLEVSIDHDIEPLHWLSQQKSIIKTYWSDRHDRFEMAGIGSADLVFSREKASSHVLFKRLRKFLSCKYSCVRYYGGICFSQNQIASYPWQDFGNHFFLVPKFEVFKDQAGTYLALNLLLHHSDNANKKIQQTLQELAAINFNLPHQQCEKPQLSKRVDFPNQLQWYNNVNKGLTYLDQGILEKVVLARQTEFTIVDSCQPEHLLSLIQKEQNCSFQFCFQLDRDKAFIGSTPERLYWRQSSQIQTEAIAGTRPRGASYQEDNNFAKELLSSPKEIREHKLVLKGLQETLSTLCHQVNIAEDPNLLRLNQVQHLYSHCSGILNPEISDADIINQLHPTPAVGGYPRQKALELIASLETFSRGFYASPIGWVALDSAEFLVSIRSGLIQRNKLILFAGAGIISDSQPEAEWEELENKIRNFLQVVSCQASVDII

SEQ ID NO: 93138 - protein, 477 aa, Acaryochloris sp.
  misc_feature (1)..(477): tr|A0A2W1JMJ6|A0A2W1JMJ6_9CYAN Salicylate biosynthesis isochorismate synthase OS=Acaryochloris sp. RCC1774 OX= 1764569 GN=pchA PE=4 SV=1
MTVTPFPAKLLQDRKSLHELFVACQATARRKEHAQVVSLSLAIPAVDPLAVLERLRQPEHLHFYWEQRSQQIAIAATEPVLQLQIDGPQRFTQAQRFICTSLVDTVTAGALDLPCAGPHFFCSFTFFDETQRETRLFPAATVFLPRWQVARVRDQAVLVANLLVDAQTNLVQLTDEVWRQWQQLRSPQTNGRGTLQSAKLSSPVAADYPVLTETERFTTAVKNILQDIEAQGLQKLVLAHTLDVTVPEPPPLGHALATLRDRYPDCYVFSVSNGKGQAFMGASPERLIELCDRNLVTDALAGSAPRGQNLTEDTHLGTQLLGNPKDNHEHQVVLDFIQNCLWELGIQSQVSSPPHLLQLPNIQHLRTLVTAKIPQNLHLLEILEALHPTPAVAGAPQKIAQQQIRKHETFERHLYAAPIGWVDHQGNGEFTVGIRSALIDGCLTRLYAGAGIVAGSDPQRELAEIQLKLHTLLDALV

SEQ ID NO: 93139 - protein, 391 aa, Achromobacter sp.
  misc_feature (1)..(391): tr|A0A0M7NYE9|A0A0M7NYE9_9BURK Isochorismate synthase e ntC OS=Achromobacter sp. ATCC35328 OX=1806490 GN=entC P E=4 SV=1
MDTSLAEEVQQTMATLAPNRFFFMSPYRSFTTSGCFARFDEPAVNGDSPDSPFQQKLAALFADAKAQGIKNPVMVGAIPFDPRQPSSLYIPESWQSFSRQEKQASARRFTRSQSLNVVERQAIPEQTTFEQMVARAAALTATPQVDKVVLSRLIDITTDAAIDSGVLLERLIAQNPVSYNFHVPLADGGVLLGASPELLLRKDGERFSSIPLAGSARRQPDEVLDREAGNRLLASEKDRHEHELVTQAMKEVLRERSSELHVPSSPQLITTPTLWHLATPFEGKANSQENALTLACLLHPTPALSGFPHQAATQVIAELEPFDRELFGGIVGWCDSEGNGEWVVTIRCAKLRENQVRLFAGAGIVPASSPLGEWRETGVKLSTMLNVFGLH

SEQ ID NO: 93140 - protein, 215 aa, Acidimicrobiaceae bacterium
  misc_feature (1)..(215): tr|A0A351XEW8|A0A351XEW8_9ACTN Salicylate biosynthesis isochorismate synthase (Fragment) OS=Acidimicrobiaceae bacterium OX=2024894 GN=DCZ35_05370 PE=4 SV=1
TIGVSIGTTSFVAATPERLVAVAGDRLHTAALAGSAPRHADPAIDAALGQGLLTSPKERSEHAVVVDAIDHALQRLGMVDHHPADPVLLRLHGIQHLHTPIDARLPRGIGLFDVVGALHPTPAVAGHPGGRSAELRSTHEGMDRGWFASPVGWLDSSGDGEFRVALRSALITDVETTLYAGAGVVRGSDPSRELLETDVKLGALLGPVIATSDTR

SEQ ID NO: 93141 - protein, 426 aa, Acidimicrobiales bacterium
  misc_feature (1)..(426): tr|A0A520WQ18|A0A520WQ18_9ACTN Isochorismate synthase O S=Acidimicrobiales bacterium OX=2201156 GN=EVA19_06700 PE=4 SV=1
MTTLAEPRQLTLIRKQIEEPVDLLALWASTSYHQKAYWTVPDTGFEFVALGKAQQFRTEERAARFQSVRAALDTLKIDLTGDTGPDFSAGVLVGGFAFSDREIERHPDWAVFGGGELVLPEIFVVRSNGSTWMTHVEGATIPSLTPELDQDLGWVKEVDHQNDPNYLELVSSALTEIDAGNMTKVVTARSLSLPANLNSAALLQRLRLRHPSCATFAIAHGSQVFLGASPETLVNVRGDRLKTAALAGSRPRHEHPGADARLRAELLANPKERNEHQIVIDDITNSLTTAGVHLDAPAPTGVMKLRRIQHLHTPISGNLPGNIDILDLIKALHPTPAVAGLPRQRAQDWIDENELMDRGWYAAPVGWMTPEGGGEFRVALRSALLTDKSLTLFAGGGIVDGAEPDRELAETATKFEALLGALDLTP

SEQ ID NO: 93142 - protein, 418 aa, Acidimicrobiia bacterium
  misc_feature (1)..(418): tr|A0A431IF11|A0A431IF11_9ACTN Isochorismate synthase O S=Acidimicrobiia bacterium OX=2080302 GN=EKK62_13800 PE =4 SV=1
MTEMDLVARTEPGQPVDELPPPGRAHVAFCSPRRSLRGSGEALRIDLPAPWPEHVDAVADTLAGIVHDGSGGAGRGPVAFGALPYDRDTPASLVVPAVIHGRTADGERWTTRIGDAAAGSDAATTSDVAASSEDGDEAPTPTDPTSVTISSVLSPREWAASVATAVDRIGRGELTKVVLARELSVRTDQALDAATLLRRFRAASPAAFAYSVDGFVGATPELLVSRIGDVVRAHPMAGTLPRTGDPDADSRRAGELLGSTKNRWEHQITIDAVHDTLLPWCSYLDAEPEPSVVAAGPVQHLATLVEGRLGQPEPSVLELVAALHPTPAVGGWPRIEALAVQAELERADRGRYAGPVGWVDAEGNGVFGVGIRGVQIAEDPTSARLFAGVGVVDGSDPWAELEETRSKAAAVLGALTRI

SEQ ID NO: 93143 - protein, 409 aa, Acidipropionibacterium acidipropionici
  misc_feature (1)..(409): tr|K7S3N3|K7S3N3_ACIA4 Isochorismate synthetase, entero chelin biosynthesis OS=Acidipropionibacterium acidiprop ionici (strain ATCC 4875 / DSM 20272 / JCM 6432 / NBRC 12425 / NCIMB 8070) OX=1171373 GN=PACID_13900 PE
MPDLDVASLTGGVLPGSSALADLSGARWLAEVSALLPADAERPRVWIAPDADDAPCILGWGTAARFSGTSAGGVHTAWEQFRSWAAGADAEPVALGSFPFARDRAGDLVVPAVTVIRRARGRRTEVLSAPGEPMPRRVPRPHREPASLAELPQPGAERAWRTAVESAVAALDDDCRVQKVVLARTVELLAPHPIDQMAVATALAARFSGCWTYAHDGLIGATPELLVDLRGGRFRSRVLAGTRKPAWSEELLSDPKEQREHQLAVASVTQVLEADGVSPTVEGPFLLRLPNVTHLATDITARVGSRTDSARVVDALHPTAAVCGTPREDAYQIIERVEGLDRGQFSGPVGWMTADGSGQWGIGLRCGQFAPGSRRVTVYAGAGIMPSSDPAKEWLETGAKMEAFLSALR

SEQ ID NO: 93144 - protein, 414 aa, Acidipropionibacterium jensenii
  misc_feature (1)..(414): tr|A0A3S4UZ24|A0A3S4UZ24_9ACTN Isochorismate synthase d hbC OS=Acidipropionibacterium jensenii OX=1749 GN=dhbC PE=4 SV=1
MPSVIVNPGSSRLRARTVAIPDPGSLQKYLTARSSMCLLHGYEEIIGLGEIARFETDSPGAADVWWEEFCADIENETEMPGVRGTGPLAFGSFTFDGDRSTSPSVMIVPETVIGRRAGYSWLTQVSFDSVHADPPRIQAPPRQPTGLELSDGVVTEQGWAERAGQVREILGDDVQRVLLMRDLMARADDPIDPRWIVQRCSDLLPDSWTYLVQGAVGTTSTLLLRQIDGLITTRTLSHGQSAVSGSDPRLLEALSGTGPFAEEHGSAVRWSEEMLRPFCRSIQHSPFPGLIPEASDRMLVTDVTGAPLPETRSLTAVGAMHPAPFVSGLPPWKALEMLAEVEGVDRGRITGPVGWIDSQGDGEWVVDWRGAQVDATDPNLLHVFIGQPVGHDDDVSLLATALRKRISATFALMR

SEQ ID NO: 93145 - protein, 436 aa, Acidipropionibacterium virtanenii
  misc_feature (1)..(436): tr|A0A344UUZ9|A0A344UUZ9_9ACTN Isochorismate synthase E ntC OS=Acidipropionibacterium virtanenii OX=2057246 GN= entC PE=4 SV=1
MTEPTPAPALPARTSRATAIESGIVPVPDLPPLISRDLSGSTGLADLDGSAWLVRVAGLLPAGIERPRVWVAPDADDAPCILGWGAAARFTGSSAGGVLTSWEAFRQWARHTDADPVALGSFPFAREQTGDLVVPAVTLIRRAKGRPTEVLSSPDAPMPHPAAGREALPAVLTEIPQPGAEDAWRTAVESAVAALDADPRMQKVVLARALELSASHPMDQMAVATALASRFTGCWTYAHDGLVGATPELLVDLRAGRLRSRVLAGTRKPAWSEELLSDPKEQREHELAVASVTQVLESDGVLPRVDGPFLLRLPNVTHLATDITAQAGGTGAAHFSAARIVDALHPTAAVCGTPREEAYRVIDRVEELDRGRFSGPVGWMTADGSGQWGIALRCGQFAPGSRNVKVFAGAGIMPSSDPAKEWLETGAKMEAFLHSL

SEQ ID NO: 93146 - protein, 427 aa, Acidithrix ferrooxidans
  misc_feature (1)..(427): tr|A0A0D8HKY5|A0A0D8HKY5_9ACTN Isochorismate synthase E ntC OS=Acidithrix ferrooxidans OX=1280514 GN=entC PE=4 SV=1
MQNRKELPSRPIEEEGLIFANSCNLGESLNKDRVMGIFRDEIQNGSAIVFMRPGLMVLASGPYLTTQTLDPKSKIREITSNFKVDRPETASLIDIFGLIPFDPKTQPTYLYVPSFVINITEEQSRLAVIGSDQNDAANKLSALADSLSGKIIKPHEEACSGDCCAPSNLAFTVDDQSWLNQAISAIDRIRNGEFEKIVLSRRTTLNLKKPLNRMRSLSRLIERYPGALSFSYGDLIGATPELLIRREGDFFESHPLAGTASTGNESALLASYKDNHEHRVVTDHITSRLNECTARIDIPTTPSITNFGDICHLGTPIRGLLRDPMNTDSIDLLLKIHPTPAVAGIPQAAAVAFIQEIEDEPRHLYAGAIGYQNLSGDGEWHLTIRTVSIDGLEIEFQAGVGIVNESDPNEELREVQAKLTAMLPIVT

SEQ ID NO: 93147 - protein, 479 aa, Acidobacteria bacterium
  misc_feature (1)..(479): tr|A0A3M2C5M9|A0A3M2C5M9_9BACT Isochorismate synthase O S=Acidobacteria bacterium OX=1978231 GN=D6696_02480 PE= 4 SV=1
MSALTSLAPAPAARPSVLDAAEIRAFVAGRLAAHAGRPATLMLSLPAPAVEPETLLRLIPGRYGFLWHPPAGTAFAGCGASHRIDLAGSARFDRLRRAAGGLFARLESVVHPAASPVPPRLFGGLAFAVGAAGDEPWRSFGDGCFTLPRLRYASDGRRATLSLTVRGEDELDRPGRRRWLELLDRAVAGLTAAAGGGIAAGDEPPGDVAAVARAVHPPPLRRWNEQVEAIRAAIADGRCEKIVAAHRSVVELARPVAPATVLRRLENGAQAATRFAFCRPDGTFLGATPERLILRRGRRIATEALAGSIASGNAHAAQLLASAKDRCEHQLVVEQIVRRLEPLCAALEVPPEPRIRALRDVLHLHTPITASLASPRHVLELVELLHPTPAVGGVPTDAALRWIARCEDVGRGWYAGPIGWFDARGDGDFAVALRTCLLRRDRAYLYAGAGIVADSDPALEYEETALKMRSLLAALGAGA

SEQ ID NO: 93148 - protein, 407 aa, Acinetobacter baumannii
  misc_feature (1)..(407): tr|A0A062SLZ1|A0A062SLZ1_ACIBA Isochorismate synthase f amily protein OS=Acinetobacter baumannii 25977_9 OX=131 0913 GN=J812_3673 PE=4 SV=1
MSVQHPYFIQRENFTESRITLAKEVLNCTDNAGFIFTTPEYIISSHQKLKDIEVTKDTQLKEWLNEARLQLQQAIADGYSDAKVMGGLPFSSSADVNLMLMQDAKVYQKALFSQTDINLDDLILKQADYLPSGEHYQQQVEYLVQQMRAQKLDKAVLARILQLEFEENLPVSDVFYNLAKHNPEGYNYAVARHPQSEGWFVGASPELLIAKQNNKIWSKPVAGTLARDDDPIVDQNNARALLASQKDQHEHALVIEMIADELTPFCKQLHVPKQPSLIRTKRLWHLASHITGELKQADTHVFDLIERLHPTPAICGEPSSVAKNLIQQLEPFNRELFAGTMGWTDAEGNGEWSVTVRCARIYQNIARLFAGAGIVEASRPQAEHAETAAKFRTVLDGLHISPDQLPR

SEQ ID NO: 93149 - protein, 395 aa, Acinetobacter baylyi
  misc_feature (1)..(395): tr|Q6F8U5|Q6F8U5_ACIAD Isochorismate synthetase OS=Acin etobacter baylyi (strain ATCC 33305 / BD413 / ADP1) OX= 62977 GN=entC PE=4 SV=1
MYYKGNGFMNDMNLSIDHAIELNINLESSCFLTKDYRLLASDLAEVVKLAACDYEKLSQTITDSFQKLKKDPNANPILVGAIPFDTTQASSLNIYRNHRKQRQLVISSKITHSPLSISNQKPLIKQKDFAHAIDIAIDQFRCDQLEKVVLSQAVDFELSQSQNPFDLVDTLAKENPHAFSFAIPVEDNAYLLGASPELLISKNDLTVRSNPLAGSRPLSEDENINQSRIHELYASEKDLNEHQIVVDSVLENLKPFCQKLKVLEKPEILKTATMLHLSTVFDGQLKKQSDNALQLALALHPTPAICGSPTEPAKQFILEHEGYDRHYFAGLVGWMDAQGNGEWAVTIRCGLLNDKKIRLYAGAGIVMGSQAELEWSETEVKMQTLLKTLSATFHS

SEQ ID NO: 93150 - protein, 408 aa, Acinetobacter bouvetii
  misc_feature (1)..(408): tr|A0A4Q7ANW7|A0A4Q7ANW7_9GAMM Isochorismate synthase O S=Acinetobacter bouvetii OX=202951 GN=EXE25_15675 PE=4 SV=1
MLAVEPSVFKNMIGITRENLIEAEVAGFVFATPTGTISSKKLLENIHFERQPELSFVEQQQKWLKHAQHKLQQRIQATGNSELILVGSLPFDHRDLPEMSIAEAKNTYVTDGLNFVPPFERLSQVQATFVPPQADYVDGVAKLVELMKTTELEKAVLARAIDLQCEQKIPVVDLFYQLFKNNPEGYTFALAQDPRKSGWFMGASPELLVAKQNQYVFSNPVAGTLARSADALEDQAQAQRLLASAKDRHEHAVVIEAIADLLSPLCDKLSIPKSPSLIKTQTVWHLATQIQGTLKDPEMHVFDLASILHPTPAVCGQPAPLARQLISDLEPFNRNLFAGTMGWSDAHGNGAWAVNVRCGRIFEYSARLYAGAGIVEASQPASELNETIAKFKTMLNALGLNADQLTYQ

SEQ ID NO: 93151 - protein, 389 aa, Acinetobacter calcoaceticus
  misc_feature (1)..(389): tr|A0A1C4HKX9|A0A1C4HKX9_ACICA Isochorismate synthetase OS=Acinetobacter calcoaceticus OX=471 GN=entC PE=4 SV= 1
MMQTQISVEQNLDHIGQKKFSCFSTKNYYLEVSEFIKTVNTPAANTALFNDEIAKCFEEIKKQGHQNPVLIGAIPFDITKKSSLNFYADHKKITQASSTINSLKNRNNIEIINKSLLIQRQKFKGTVQLALDAFEKKKVEKVVLSQAVEYEFNRHQEPENLLAALLKQNPNAYNFVIPVEHNNYILGASPELLLSKQDRIVTSNPLAGSRPKSQISEKNFVSQQELNHSEKDQHEHRIVVENIIRNLATHCVELKVSEFPDILETSTMLHLSSEFQGVLKQQAPDALNLALELHPTPAVCGSPTHVAKQFILDHEGYDRHYYTGLVGWMDAEGNGEWVVTIRCGLLSENKMRLYAGAGIVEGSDAEAEWLETEAKMQTMLNILNTKIAV

SEQ ID NO: 93152 - protein, 410 aa, Acinetobacter colistiniresistens
  misc_feature (1)..(410): tr|A0A558F7S4|A0A558F7S4_9GAMM Isochorismate synthase O S=Acinetobacter colistiniresistens OX=280145 GN=FPV60_1 0390 PE=4 SV=1
MSIQHPYFIQKENYTESRVALAHEILQCHHDAGFYFTTPDYVLKSQHKLQDIEIPRGSHLSDWLKQARAQLDQAIRTGHHQAMILGGIPFSNANDVNLMLMDDVRFYQKLIYTQPFGARPEHALRHARFIPSGQQYQTQVAELVDKMQRGQLNKAVLARVLELELADEIDVSQLFYQLSQDNPEGYNYAVARHSAQEGWFVGASPELLVGKQGTNVSSKPVAGTLARDIDPIQDQHNAQQLLASAKDQHEHAVVIEMIADQLSPFCKTLHIPKQPSLIRTKRLWHLATRIDGELKNKDIHIFDLVEKLHPTPAICGQPTAVAKTLIEDLEPFNRELFAGTMGWADAQGNGEWSVTVRCARIQQHIARLFAGAGIVAASDPSAEHAETAAKFRTVLDGLGFSSAQVMEKVK

SEQ ID NO: 93153 - protein, 389 aa, Acinetobacter haemolyticus
  misc_feature (1)..(389): tr|D4XRW5|D4XRW5_ACIHA Isochorismate synthase OS=Acinet obacter haemolyticus ATCC 19194 OX=707232 GN=amoA PE=4 SV=1
MMQTTTSAEQNLEHNDQHKFSCFSTKNYHLTVKDFVKTINTPAANITLFNDEIAKCFDEMKKQGSRNPILIGAIPFDITKKSSLNFYADYQKKPQKTSDFHPLRDRDQVEVVNKSLLIQRQKFEGAVQLALNAFEAKKVEKVVLSQAVEYEFDHQQKPENLLSALLKQNPNAYNFVIPVEHNHYILGASPELLLSKQDRIVSSNPLAGSRPKSNISEKNLCSKQELHHSEKDQNEHRIVVENILKNLVSYCVELKVSEFPDILETSTMLHLSSEFQGVLKRQAPNALNLALELHPTPAVCGSPTDVAKQFILDHEGYDRHYYTGLVGWMDADGNGEWVVTIRCGLLSENKMRVYAGAGIVKGSDAEEEWFETEAKMQTMLNIFNANSTV

SEQ ID NO: 93154 - protein, 412 aa, Acinetobacter lactucae
  misc_feature (1)..(412): tr|A0A429IYX4|A0A429IYX4_9GAMM Isochorismate synthase O S=Acinetobacter lactucae OX=1785128 GN=EA763_12415 PE=4 SV=1
MSAQHPYFIQRENFTESRVALAQEILNCGNDAGFIFTTPEYTINSHQKLRDIQVTKNSLLKDWLDEARAQLELAINDGYKDVKIMGGLPFCSTADVNLMLMQNAKIYQKVLYAQSDIDFGSLSLKKADYFPLGEHYQQQVEYLVQQMQAKKLDKAVLARILQLEFEQNISVSDLFYNLAKHNPEGYNYAVARHPQSEGWFVGASPELLIAKQNTKIWSKPVAGTLARDDDPTLDQNNARALLASQKDQHEHALVIEMIADELTPFCKQLKVPKQPSLIRTKRLWHLASHITGELKKADTHVFDLIERLHPTPAICGEPSPIAKELIQQLEPFNRELFAGTMGWADEQGNGEWSVTVRCARIYQNIARLFAGAGIVEASRPQAEHAETAAKFRTVLDGFQISPNQMPIQGPNT

SEQ ID NO: 93155 - protein, 408 aa, Acinetobacter piscicola
  misc_feature (1)..(408): tr|A0A4Q4GZA9|A0A4Q4GZA9_9GAMM Isochorismate synthase O S=Acinetobacter piscicola OX=2006115 GN=EWP19_07230 PE= 4 SV=1
MLPVEPSVFKNMIGITKEDLIETDVAGFVFATPTGAISSQKLLENIQFDRNTALSFEQQQQAWLQHAQQKLQQKIQQTGNAELILVGSLPFDHRDLPEMSIAEAKNSYVSDGLAHLAASKGHSNVQATLVPPQVDYVNGVAKLVELMKKTDLEKAVLARAIDLNSTHKFSVVELFYRLFHNNPEGYTFALAQDPKKSGWFMGASPELLVAKQNQYVFSNPVAGTLARSADPHEDQAQAQRLLTSTKDQHEHAVVIEAIADQLSPLCQSLTIPKTPSLIKTQTVWHLATQIKGTLKDPEMHVFDLISILHPTPAVCGQPAPLARQLISELEPFQRNLFAGTMGWSDVQGNGAWAVNVRCGRIFEHSARLYAGAGIVEASQPTSELNETIAKFNTMLNGLGLNADQLSYQ

SEQ ID NO: 93156 - protein, 412 aa, Acinetobacter pittii
  misc_feature (1)..(412): tr|A0A4S1DIS2|A0A4S1DIS2_ACIPI Isochorismate synthase O S=Acinetobacter pittii OX=48296 GN=YA64_011075 PE=4 SV= 1
MSVQHPYFIQRENFTESRITLAKEVLNCTDNAGFIFTTPEYIISSHQKLKDIEFTKDTQLKEWLNEARLQLQQAIAEGYSDAKVMGGLPFSSSADVNLMLMQDAKVYQKALFSQTDINLDNLILKQADYLPSGEHYKQQVEYLVQQMRAQKLDKAVLARILQLEFEENLPISDVFYNLAKHNPEGHNYAVARYPQSEGWFVGASPELLIAKQNTRIWSKPVAGTLARDDDPTLDQNNARALLASQKDQHEHALVIEMIADELTPFCKQLQVPKQPSLIRTKRLWHLASHINGELKKADTHVFDLIERLHPTPAICGEPSPIAKELIQQLEPFNRELFAGTMGWADEQGNGEWSVTVRCARIYQNIARLFAGAGIVEASHPQAEHAETAAKFRTVLDGFQISPNQLPIQGPNT

SEQ ID NO: 93157 - protein, 407 aa, Acinetobacter seifertii
  misc_feature (1)..(407): tr|A0A5E9PMD0|A0A5E9PMD0_9GAMM Isochorismate synthase O S=Acinetobacter seifertii OX=1530123 GN=E2R16_02665 PE= 4 SV=1
MSVQHPYFIQRENFTESRITLAKEVLNCTDNAGFIFTTPEYIISSHQKLKDIEVTKDTQLKEWLNEARLQLQQAIADGYSDAKVMGGLPFSSSADVNLMLMQDAKVYQKALFSQTDINLDDLILKQADYLPSGEHYQQQVEYLVQQMQAQKLDKAVLARILQLEFEENLPISDVFYNLAKHNPEGYNYAVARYPQSEGWFVGASPELLIAKQNNKIWSKPVAGTLARDDDPIIDQNNARALLASQKDQHEHALVIEMIADELTPFCKQLHVPKQPSLIRTKRLWHLASHITGELKQADTHVFDLIERLHPTPAICGEPSSVAKNLIQQLEPFNRELFAGTMGWADAEGNGEWSVTVRCARIYQNIARLFAGAGIVEASRPQAEHAETAAKFRTVLDGLHISPDQLPR

SEQ ID NO: 93158 - protein, 407 aa, Acinetobacter sp.
  misc_feature (1)..(407): tr|A0A010JX71|A0A010JX71_9GAMM Isochorismate synthase f amily protein OS=Acinetobacter sp. 1566109 OX=1310683 G N=J582_2025 PE=4 SV=1
MSVQHPYFIQRENFTESRITLAKEVLNCTDNAGFIFTTPEYIISSHQKLKDIEVTKDTQLKEWLNEARLQLQQAIADGYSDAKVMGGLPFSSSADVNLMLMQDAKVYQKALFSQTDINLDDLILKQADYLPSGEHYQQQVEYLVQQMRAQKLDKAVLARILQLEFEENLPVSDVFYNLAKHNPEGYNYAVARHPQSEGWFVGASPELLIAKQNNKIWSKPVAGTLARDDDPIVDQNNARALLTSQKDQHEHALVIEMIADELTPFCKQLHVPKQPSLIRTKRLWHLASHITGELKQADTHVFDLIERLHPTPAICGEPSSVAKNLIQQLEPFNRELFAGTMGWADAEGNGEWSVTVRCARIYQNIARLFAGAGIVEASRPQAEHAETAAKFRTVLDGLHISPDQLPR

SEQ ID NO: 93159 - protein, 406 aa, Actinoalloteichus hoggarensis
  misc_feature (1)..(406): tr|A0A221VXB6|A0A221VXB6_9PSEU Isochorismate synthase E ntC OS=Actinoalloteichus hoggarensis OX=1470176 GN=entC PE=4 SV=1
MGRLQARTVAADSDADLLALLPDPEPVFSWVHGGEGLVGWGEAARIEVKGADRFAEAERWWADLVAAADVEDAVGLPGTGLVAFVSMSFADEPGSSVVIVPKVVVGRRDGVTWRTELRDDDEPFAPAVQPVRRVRVTRYSEGRLSVTDYRKAVAGAVERMRAGELAKVVLAHDLIAETDSPLDQRFLLRNLADRYPSCWVFAVDGLIGATPEMLLRKTGETVESRVLAGTAWPGAGESAESRLSSAKNRSEHEFAIRSLADTLRPYCTELHVPETPSVLRLPNVAHLASDVTGRLDPDTTAGPGALLRLGHAVHPTAAVGGTPRTEAVALIAELEAMDRGRYAGPVGWIDADGDGELGIALRCAELRGSLVRLFAGCGIVSGSDPDAEVREAAAKMLPIRDALEAT

SEQ ID NO: 93160 - protein, 373 aa, Actinoalloteichus hymeniacidonis
  misc_feature (1)..(373): tr|A0A1D8BRD9|A0A1D8BRD9_9PSEU Isochorismate synthase O S=Actinoalloteichus hymeniacidonis OX=340345 GN=TL08_02 545 PE=4 SV=1
MVGWGEAVRLDLGGADRFAEAEQWWRDLVANTEVADDIGLPGTGLVAFVSMAFADQPGASVLVVPKVVVGKRDGVVWRTELYRAGDEPEGSIVEPVRRVRVTRYSEGHLPVTGYRKAVTEAVRRMRAGELEKVVLAHDLIAETDTALDQRFLLRNLAARYPNCWTFAVDGLVGATPELLLRKTGATVQSRVLAGTAWPGSGGADSAGSSLDSAKNLSEHGFAVLSLADTLRPFCTTLDVPTQPRVLQLPNVTHLASDVTGRLDPAEATGPGALLRLIHAVHPTAAVGGTPTPDAVAVIAELEAMDRGRYSGPVGWIDADGDGELGIALRCAQVEGSRVRLFAGCGIVVDSDPDAEVREAAAKMLPIRDALETP

SEQ ID NO: 93161 - protein, 388 aa, Actinoalloteichus sp.
  misc_feature (1)..(388): tr|A0A1L7F128|A0A1L7F128_9PSEU Isochorismate synthase O S=Actinoalloteichus sp. GBA129-24 OX=1612551 GN=UA75_02 505 PE=4 SV=1
MLPNPEPVFSWVHGGEGLVGWGEAARIEVKGADRFAAAERWWSELVATAEVEDTIGRPGTGLVAFASMSFADEPGSSVLIVPRVVVGRRDGATWRTELHEGDDAPITPIVQPVRRVRVTRYSEGRLSVTDYRKAVARAVERMRAGELAKVVLAHDLVAETDSPLDQRFLLQNLAARYPSCWAFAVDGLVGATPELLLRKTGETVESRVLAGTAWPGSGESAESRLDSAKNRSEHEFAVRSLAETLRPYCTELDVPQTPSVLRLPNVAHLASEVSGRLDPAKTTGPGALLRLGHAVHPTAAVGGTPRTEAVALIAELEAMDRGRYAGPVGWIDARGDGELGIALRCAELRGSLVRLFAGCGIVSDSDPDAEVREAAAKMLPIRDALESA

SEQ ID NO: 93162 - protein, 427 aa, Actinobacillus delphinicola
  misc_feature (1)..(427): tr|A0A448TV37|A0A448TV37_9PAST Isochorismate synthase M enF OS=Actinobacillus delphinicola OX=51161 GN=menF PE= 3 SV=1
MLSIIKQAILSKLEKLDFNSAPNIAVIRLTQMNFSLPLLNWLKAQLRYPQFYLHYRDKTQHCVALGSIKTFTDSQQAEVFCQKEDLPLVGGRQFTGETFFFLPRLLLEQKENSLSVSLFVDVRANRESEIQQTEQILQNFTQIAQREQLPKIVKELASEADEATWCNWVEQACHAIQEKQFTKVVLANAKSFQTESVLNPYDFLSESEAYNQHCYHFLFAKDNTTVFLGSTPERLFLRQNSKLFTEALAGTAFVSEDEEETQRQADWLFNDEKNRHENQLVVENIQQSLQNVVKTFEVGERQIKRLRKVQHLQRPICGELIEGQADASCLQKIHPTAAVAGLPKSAAMQFINQIEGQAREWYAGTLGVMTKSQSEFCVTIRSANIRNDIIQVFAGAGIVEGSIPAHEWREIERKALGLVSLLEMKKE

SEQ ID NO: 93163 - protein, 139 aa, Actinobacillus equuli
  misc_feature (1)..(139): tr|A0A448QMU8|A0A448QMU8_ACTEU Menaquinone-specific iso chorismate synthase OS=Actinobacillus equuli OX=718 GN= menF_1 PE=4 SV=1
MNLKDCITEIAVSQAEIKRLHNVQHLRRKIAAQLKPNMSDADCLARIHPTAAVAGLPRQAAKQFIAEYEQFTRCWYAGTFGYLQPNEAEFCVALRSAQIEQNCITLYAGAGIVEESEPQSEWQEIERKSLALAKLLKVD

SEQ ID NO: 93164 - protein, 424 aa, Actinobacillus indolicus
  misc_feature (1)..(424): tr|A0A4P7CH08|A0A4P7CH08_9PAST Isochorismate synthase M enF OS=Actinobacillus indolicus OX=51049 GN=menF PE=3 S V=1
MSVFSQLKQQLYQQLQQKPVVQGLVQLQAEIAIDLENQQLLAWLKAQPLFPHYYWQNRDTEQTIVAVGAVQTFEHLDEVEQFSKQSDLMVVGGMEFEGQCHFVLPRLLLVKNEKKITAWLNLDCRHFETEQKECIALLAQFEQTAELHPIENRLLSTEVACDFSRWQQNIELAIEQIQRQQMNKVVLANATTKTFAHHISPYDLLFASQQKNLGCYHFLWSEKQGEAFIGSTPERLYLRQQRQFFTEALAGTVAVTDDPVQTEQNALWLLNDQKNIYENWLVVDDICSHLADCATDIQVSDAEIKRLHNVQHLRRKIQTQLTEQVSDADCLARIHPTAAVAGLPRPKAKQFIQQQECFERGWYAGALGYFTPEQAEFCVMLRSALIQANQITFYAGAGIVEKSDPQSEWQEIDRKAQAMAGLMG

SEQ ID NO: 93165 - protein, 426 aa, Actinobacillus lignieresii
  misc_feature (1)..(426): tr|A0A380TQH6|A0A380TQH6_ACTLI Isochorismate synthase M enF OS=Actinobacillus lignieresii OX=720 GN=menF PE=3 S V=1
MSIFNQLKQQLSKQLIESGTHFGLVEYQAEAALSEENIALLSWLKAQNHYPHFFWQARETDQTIASIGAVRSFFSVDEAQQFVKQTQFGLVGGVRFEGACQFILPRLLLVKNQQNLTAYFYLNEAELAQQAVIFERFFANFCQTLPLELTENNLLAQTSVYDFDGWQQNIERAISHIQQKDFNKVVLANAKTLQFENELSAYDLLAASQTTNLGCYHFIWAENVESVFVGSSPERLYHRKGNQFHTEALAGTAPVTESMVQTELNAQWLLTDPKNIYENQLVVDDIQAQLTDCVTELQISQAEIKRLHNVQHLRRKISAVLKPEMSDADCLARMHPTAAVAGLPRQAAKQFIAEYEQFTRCWYASTLGYLQPDEAEFCVALRSAQIERNRITLYAGAGIVEESEPQSEWQEIERKSLALAKLLKVD

SEQ ID NO: 93166 - protein, 432 aa, Actinobacillus minor
  misc_feature (1)..(432): tr|C5RZV2|C5RZV2_9PAST Isochorismate synthase MenF OS=A ctinobacillus minor NM305 OX=637911 GN=menF PE=3 SV=1
MSIFSQLKQQLSEQLAKQASQQGLIELQASVCLSDENVAFLAGLNAQKNIYPHFFLKNRDRDQTITALGAVKTFQQLETAQAFIQQTHFSLIGGLQFEGECCFVLPRLKLVKEQQNLTAYFYLDLSAETSQAVNFDDYFAPFLAEQNELAPPSRPFANKLIDRKTACDFEGWQANINKAINEIQAQHFSKVVLANAICLTFDKPISAYELLEQSQKINLGCYHFLWAENSETAFVGSTPERLYLRQARNLYTEALAGTVAVTEDLAQTEQNAQWLLNDTKNVYENQLVVDDITRHLEDCVEQIEIGKAEIKRLHNVQHLRRKIQAVLKPTISDSECLIRIHPTAAVAGLPRAKAKQFIAENEPFTRGWYAGTLGILGEDEAEFCVTLRSAQIKQNQVTLYAGAGIVQDSEPLSEWQEIERKSQALAKLLSYT

SEQ ID NO: 93167 - protein, 426 aa, Actinobacillus pleuropneumoniae
  misc_feature (1)..(426): tr|A0A223MBB9|A0A223MBB9_ACTPL Isochorismate synthase M enF OS=Actinobacillus pleuropneumoniae OX=715 GN=menF P E=3 SV=1
MSIFNQLKQQLSKQLIESGTHFGLMEYQAEVALSEENIALLSWLKAQNHYPHFFWQARETDQTIASIGAVRSFFSVDEAQQFVKQTQFGLVGGVRFEGGCQFILPRLLLVKNQQNLTAYFYLNEAELAQQAVIFERFFANFCQTLPLELTENNLLAQTSVYDFDGWQQNIERAISHIQQKDFNKVVLANAKTLQFENELSAYDLLAASQTTNLGCYHFIWAENVESAFVGSSPERLYHRKGNQFHTEALAGTAPVTESMVQTELNAQWLLTDPKNIYENQLVVDDIQAQLTDCVTELQISQAEIKRLHNVQHLRRKISAVLKPEMSDADCLARMHPTAAVAGLPRQAAKQFIAEYEQFTRCWYAGTLGYLQPDEAEFCVALRSAQIERNRITLYAGAGIVEESEPQSEWQEIERKSLALAKLLKVD

SEQ ID NO: 93168 - protein, 423 aa, Actinobacillus porcinus
  misc_feature (1)..(423): tr|A0A4V0IIM0|A0A4V0IIM0_9PAST Isochorismate synthase M enF OS=Actinobacillus porcinus OX=51048 GN=menF PE=3 SV =1
MMFELLAEKVKSHQIDTQSPMITAFRFEMAEFGALLAWLKAQHLFPQYYLNFRDSDNKIAALGKVRSFGDEISAQQFIEQTQQPLIGGLTFDKKGHFWLPRLLIEQQKHQVVISVFMDNQADLAQEKQQALNVIQTLTHFAELEPLNSQARLVSQKANQEVWCHWVEQALRAIEQGELNKVVLANESLFESAQPINAKDFLAESEKQNTGCYHFLYAETPESTFVGSTPERLFERSGVQVKTEALAGTALMSDDVQQNQAQADWLLHDQKNDDENWLVVKDICDNLQEFVSHIQVGDVELKQLRRVQHLRRCIQAELKPSFADAACLHAIHPTAAVSGLPQQNALAFLQKTENFDRTWYAGTLGMMTQSHGEFCVTIRCAFIEQNNIRIFAGAGIVAGSIPLLEWQEIERKASGLVTLLGTGK

SEQ ID NO: 93169 - protein, 436 aa, Actinobacillus porcitonsillarum
  misc_feature (1)..(436): tr|A0A2U8FJ76|A0A2U8FJ76_9PAST Isochorismate synthase M enF OS=Actinobacillus porcitonsillarum OX=189834 GN=men F PE=3 SV=1
MSIFSQLKQQLSEQFAKQVSLQGLIEIQASVCVSDENVAFLAGLNAQKNIYPHFFLKNRDRDQTVITLGAVKTFQQLETAQAFIQQTGFPLIGGLQFEGECCFVLPRLKLVKEQQNLTAYFYLDLSTETSQAVNFDDYFATFEAQQNDLAPLSNSSFAHKPLANKLIDRKTACDFEGWQTNINKAINEIQAQNFSKVVLANAICLTFDKPISAYELLEQSQKINLGCYHFLWAENSETVFVGSTPERLYLRQARNLYTEALAGTVAVTEDLDQTEQNAQWLLNDTKNVYENQLVVDDITRHLEDCVEHIEIGKAEIKRLHNVQHLRRKIQAVLKPTISDSECLIRIHPTAAVAGLPRAKAKQFIAENEPFTRGWYAGTLGIWGENEAEFCVTLRSAQIKQNQVTLYAGAGIVQDSEPLSEWQEIERKSQALAKLLK

SEQ ID NO: 93170 - protein, 424 aa, Actinobacillus seminis
  misc_feature (1)..(424): tr|A0A263HEX4|A0A263HEX4_9PAST Isochorismate synthase M enF OS=Actinobacillus seminis OX=722 GN=menF PE=3 SV=1
MDSFHFLKKQLIEKINTYQPQHEEITVLQSQSAVEVNLLSWLKAQNVYPQFYLKRRDEVQTFAAVGKVRSFSDTNLAQQFIETHDFTLIGGLTFDGETLLYLPRLLLLQEKAQLSAQLFIDNRVDWATEKTQLLSLLENLEKTTALLPIQQSIYQYSPTASQAQWCQWVENALQHIQQGHAGKIVLANETLFHTEQPLCAKEVLAESEQYNVGCYHFLLARDAECSFIGSTPERLYQRDGDQLQTEALAGTAFMSEDEQLNRQQATWLLHDPKNIYENSLVVEDIQQNLRPFSTQIEVSELGIKQLRQVQHLRRPISAKLAENCGDSVCLQAIHPTAAVAGLPRQAAKQFLQQTETFQRSWYAGTLGFMRQQQAEFCVAIRSAFIEQNKIRVFAGAGIVEGSIPLLEWQEIERKALGLISLLQE

SEQ ID NO: 93171 - protein, 426 aa, Actinobacillus succinogenes
  misc_feature (1)..(426): tr|A6VMF7|A6VMF7_ACTSZ Isochorismate synthase MenF OS=A ctinobacillus succinogenes (strain ATCC 55618 / DSM 222 57 / 130Z) OX=339671 GN=menF PE=3 SV=1
MERLQHALSEQIKTHSFTPQSQTITAFRAETAAVGSLLSWLKGQVMFPQYYLNFRDNSRCIAAIGKVRSFSDEISAQQFVRRTDLLVAGGLTFDKRATFWLPRMVLEQKNNKLYATLYTDGEQPPQNERQAALDAVKTLSNYTALLPVRQTLRLESQKADENRWCEWVQKAVNAIERGDFTKVVLANESCFIASNPIDSKDFLAESEKQNTGCYHFLYAENPQQVFVGSTPERLFARQNNFIRTEALAGTAAMSEDPIQNQREAAWLLSDPKNDNENLLVVKDICDNLADYVRRTDVGEVGLKQLRRVQHLRRRIRAELKPPFSDAACLRAIHPTAAVSGLPQKNALDFLKNTENFDRTWYAGTLGVMTKEHSEFCVTIRSAFIESNKIRVFAGAGIVAGSVPLLEWQEIERKASGLLTLLTHRGE

SEQ ID NO: 93172 - protein, 426 aa, Actinobacillus suis
  misc_feature (1)..(426): tr|K0FVI1|K0FVI1_ACTSU Isochorismate synthase MenF OS=A ctinobacillus suis H91-0380 OX=696748 GN=menF PE=3 SV=1
MSIFNQLKQQLSEQPTENKTAFGLIEYQASVPFSEENVALLNWLKAQEHYPHFFWQARDTDQTIASIGTAKSFSSLEEAQQFVKQTQLGLVGGIQFEGDCQFILPRLQLVKNQQNLTAYFYLNEAELAQQEVIFEQFFANFIQTLPLELTENNLLSLTSVYDFDGWQQNIERAISHIQQHNFNKVVLANAKTLQFEHELSAYDLLAASQTTNLGCYHFIWAENAKSAFVGSSPERLYHRKGPQFNTEALAGTAPVTESAIQTELNAEWLLTDPKNIYENQLVVDDIQIHLEDCTTEITVSQAEIKRLHNVQHLRRKISAQLKPNMSDADCLARIHPTAAVAGLPRQAAKQFIAEYEQFSRCWYAGTFGYLQPDEAEFCVALRSAQIEQNCITLYAGAGIVEESEPQSEWQEIERKSLALAKLLKVD

SEQ ID NO: 93173 - protein, 426 aa, Actinobacillus ureae
  misc_feature (1)..(426): tr|E8KJD4|E8KJD4_9PAST Isochorismate synthase MenF OS=A ctinobacillus ureae ATCC 25976 OX=887324 GN=menF PE=3 S V=1
MSIFNQLKQQLSKQPTENKTHFGLIEYQASVPFSEENVALLNWLKAQEHYPHFFWQARDTDQTIASIGTAKSFSSLEEAQQFVKQTQLGLVGGIQFEGDCQFILPRLQLVKNQQNLTAYFYLNEAELAQQAVIFEQFFANFTQTLPLELTENNLLSQTSVYDFDGWRQNIERAISHIQQHKFNKVVLANAKTLQFEHELSAYDLLAASQTTNLGCYHFIWAGNAKSAFVGSSPERLYHRKAAQFNTEALAGTAPVTESAIQTELNAEWLLTDPKNIYENQLVVDDIQIHLEDCTTEITVSQAEIKRLRNVQHLRRKISAQLKPNMSDADCLARIHPTAAVAGLPRQAAKQFIAEYEQFSRCWYAGTLGYLQPDEAEFCVALRSAQIEQNCITLYAGAGIVEESEPQSEWQEIERKSLALAKLLKVD

SEQ ID NO: 93174 - protein, 441 aa, Actinobacteria bacterium
  misc_feature (1)..(441): tr|A0A3N5LIK5|A0A3N5LIK5_9ACTN Isochorismate synthase O S=Actinobacteria bacterium OX=1883427 GN=EHM57_02310 PE =4 SV=1
MAPVSLIPQSAIDRLRALPRGDRFRFLDTPADIDPLGLVRSGAHLFGQAFFVATPGGARFGGLGTAWKATASGGDRLRALRDRIRDLDLPAGERVMVGFSFSDAGPLAEHWGGFGAADAVLPIVAAEHGPEGTILRLALPPGSDPEALANLLQSLRPAPDPLPLDLGDHVIESHPHVSEWRHRVAEAVAAIRAGALEKVVLSRSVVVRSTVPVGGFDVLHQLAGAYPGCYAFGWGVGDAVFIGASPELLLEMRGDRFLSNPLAGSAARGEGELEDRALGESLLASEKDRVEHSLVVDDVAARLRPHAMVMEVPVAPTLRRVATVQHLSTEISGTFHPGTHLLDVVADMHPTPAVGGTPRLEAAGIIDKAEDIDRGWYTGGIGWVGPGSDGLIALALRCGLVRGATAHLYAGAGIVADSDPDQELLETRLKLRPLLELLASG

SEQ ID NO: 93175 - protein, 409 aa, Unknown
  misc_feature (1)..(409): tr|J9DTU3|J9DTU3_9ACTN Isochorismate synthase OS=actino bacterium SCGC AAA027-L06 OX=913338 GN=A27L6_0011000007 90 PE=4 SV=1
MAILITTENLGENPVLTSVANELDLTTTWIRSGDGLMGFGEYKKIELTGEDRFEKAKSWWQIQLSEFKIQNNVHGSGTGPILFGSFSFDPNEKSILVIPKIILGKKAGKSWVTWIGDNTQPNFSTLSKSLPSGEITWSDGALSESQWKDQVGFAVDSIKQNKLEKVVLARDQVAASTVAINTRGLLQRLEIEYPSTWLFLVDGLVGATPELLVRLSKSLVTSRVLAGTIRKTGNEDRDLALAASLAKSSKDLEEHEYAVRSVADALAPFCSSTNVPESPFVLHLSNVMHLATDVTGVLNDSAKQADIFTLIQQLHPSAAVCGTPTNAAKKFIIDFEKMNRERYAGPVGWIDANGDGEIAIALRCGQLSRDNKSIRIFAGCGVVAGSDPANELAESQAKLMPMRTALETL

SEQ ID NO: 93176 - protein, 398 aa, Actinokineospora spheciospongiae
  misc_feature (1)..(398): tr|W7IU36|W7IU36_9PSEU Isochorismate synthase of sidero phore biosynthesis OS=Actinokineospora spheciospongiae OX=909613 GN=UO65_0788 PE=4 SV=1
MSAAALVRPRPVHRAADLLSAYLPGSFYYSSARGSLLADGVHAPVDAPHGTRAAAAAAALTAAAVAGVEEPVVVGAIGFRPDGPSSLVVPALVRRAGAPGGDGPTGAARVPAWTITPRPEPAAYTAAVRRALDLIDDGDLDKVVLGRCLDLLADTPVAVPALLARLVRADPAAHAFAVDVSAPGDPAPRTLLGASPELLVSRHGTEVVANPLAGSLPRVADEDENRRRRAALLASAKDRAEHAHVAAGVAEVLGRSCVDLDVPAEPSVIGTPTMWHLSTRITGRVADPADPGSSALALAEALHPTPAVCGVPVVRAREAIADLEPLDRGHFTGLVGWTDLNGDGEWVVTIRCAEVCDRSVRLFAGAGVVAGSDPAAELAETGAKFRTLLRALGAEDPR

SEQ ID NO: 93177 - protein, 413 aa, Actinomadura chibensis
  misc_feature (1)..(413): tr|A0A5D0NC56|A0A5D0NC56_9ACTN Isochorismate synthase O S=Actinomadura chibensis OX=392828 GN=FXF69_34530 PE=4 SV=1
MKLAVTAPDRLSVRTVPVPDPGDLVARLPHPTALAWIRDGQGIVGWGEAARLTLPGGDGGDRFTDAARLLTRLFGAADVDDPVDLPGTGPVAFGSFGFDPKSPDSVLIVPRRVLGRRDGAAWLTTIGDDTEPLTLTAPPAAPTGLTWNQGALSEQAWKDAVAAAVARIRDGRLGKVVLARDVTARAAAPIDARVLLRRLTGRFPACYAFSCAGLVGATPELLIRRTGGDIESLVLAGTTARGTGPADDRARAARLFASAKDREEHRYAADMVRDALTPLCAELTVPDQPELLTLPNLTHLASPVRGRLAADRSVLDVVAALHPTPAVAGTPTGTALDLIRELEGMDRGRYAGPVGWVDARGDGEWGIALRCAEIDGTRARLFAGCGIVADSDPDAELAEARTKLRPMQYALHG

SEQ ID NO: 93178 - protein, 358 aa, Actinomadura parvosata
  misc_feature (1)..(358): tr|A0A2P9ITU9|A0A2P9ITU9_9ACTN Menaquinone-specific iso chorismate synthase OS=Actinomadura parvosata subsp. ki stnae OX=1955414 GN=KIS93_10892 PE=4 SV=1
MAVPPGPGRFAWARQWLATVLGDAQVHDDVRTPGSGAVAFGSFTFDEDSHGSVLVVPRAVLARRDGHAWLTTVGEAPLESFTPVRDPGRISYGDGSLTAPEWEHVVARAARRIREGELEKVVLARDLVATAERPIDVRLLLSRLAARYPECYTFSVAGLVGATPELLIRRTGQEIESLVLAGTTARGTGPADDLARGAALFASAKDRHEHECAIASVRHTLAPLCSSLTTPDEPELLVLPNVQHLASHVTGRLADGASVLDVVAAMHPTAAVGGTPTKTAIQVIRELEGMDRAGYAGPVGWIDANGDGEWGIALRSGQVQGRRARLFAGGGIMGDSDPAAELAEAQAKFRVMQYALEG

SEQ ID NO: 93179 - protein, 389 aa, Actinomadura sp.
  misc_feature (1)..(389): tr|A0A4R4L9Q8|A0A4R4L9Q8_9ACTN Isochorismate synthase O S=Actinomadura sp. KC216 OX=2530370 GN=E1264_39120 PE=4 SV=1
MTILTEPHADLLSAYLPGDSFFFRSPGHTLLARGTAATVPTCNSGHPAATLARRVRETLAEARAAGQPRPIVVGALPFDTTTPARLTVPATVHWTGPTWTQEPPDEPPVAFGTVRQTPSPETYKQSVAKALDQLEEGALEKVVLARAFDLDDVVRADVPAMLHRLAHGNPAGYVFAVDLLRGRTLLGASPELLVQRSGGLVTANPLAGSAPRHPDPDADARAGEALLASAKDLYEHSMVVDAVAAGLRQFCGDLEVPHRPALSRTPTMWHLSTRIQGRLLDPDVASIHLAAALHPTPAVCGTPQELARGAIQRLEPFNRGFYSGAVGWTDSSGDGEWAIALRCAEVAPHEIRAYAGAGIVTGSDPEAELAETTAKFRTFLRALGIERDL

SEQ ID NO: 93180 - protein, 413 aa, Actinomadura syzygii
  misc_feature (1)..(413): tr|A0A5D0UEP4|A0A5D0UEP4_9ACTN Isochorismate synthase O S=Actinomadura syzygii OX=1427538 GN=FXF65_08135 PE=4 S V=1
MKLAVTAPDRLSVRTVPVPDPGDLVARLPHPTALAWIRDGQGIVGWGEAARLTLPGGDGNDRFTDAARLLTRLFGAADVDDPVALPGTGPVAFGSFGFDPKSPDSVLIVPRRVLGRRNGVAWLTTIGDDTEPLTLTTPPAAPTGLTWSQGALAEHAWKDAVAAAVARIRDGRLGKVVLARDVTARAAAPIDARVLLRRLADRFPACYAFSCAGLVGATPELLIRRTGGDVESLVLAGTTARGAGPADDRARGARLFASAKDREEHRYAADMVRDALAPLCAELTVPDEPELLTLPNLTHLASPVRGRLAADRSVLDVVAALHPTPAVAGTPTGTALDLIRELEGMDRGRYAGPVGWVDARGDGEWGIALRCAEIDGTRARLFAGCGIVADSDPAAELAEARTKLRPMQYALNG

SEQ ID NO: 93181 - protein, 502 aa, Actinomyces bovis
  misc_feature (1)..(502): tr|A0A2X0TTJ3|A0A2X0TTJ3_9ACTO Isochorismate synthase d hbC OS=Actinomyces bovis OX=1658 GN=dhbC PE=4 SV=1
MLRVLEASAAQAAPPRLLWRTQALDPALLPGGPTAPDLLALLAGRNDVVSWVREGRGLVGIGRVLELRAHGPQRIEALRTAWRATVYHSWWSDPLVRPGTGPVALGAVAFSPSSAANSVLVVPELLLGLDEQGAWITQAMLAAGDSETLPEGSAPEVSAPELLRRFVADAEWAPLAAADPVVGGALGSMSPGASATPGPTAGATAPAAACLPAPVGAGLQPGAQGDADWMAAVEQARRALQRGDLEKVVLARDLTVVPTQAGHTGDLLRRLGADYPSCWTFAVDGMVGASPELLVRLRQRRLSSRVLAGTARRHASTPGQREAEAQRLARWLEESAKNNREHALARASALAALRPLCSVVECPERFVLTLPNVLHLASDVTGVVAGDTGALSLVGALHPTAAVCGTPRRTAAALIEELEHMDRGRYAGPVGWVDWHGEGEWCIALRSAQLAGDGSGGLSPDLPLRAFGGGGIMPDSDPADELAETKAKMRPVLDALGAQESP

SEQ ID NO: 93182 - protein, 477 aa, Actinomyces bowdenii
  misc_feature (1)..(477): tr|A0A3P1V830|A0A3P1V830_9ACTO Isochorismate synthase O S=Actinomyces bowdenii OX=131109 GN=EII10_05700 PE=4 SV =1
MPRDHRPRALPRTGPAPGHPHSPDGPALDAGACRQQPPRLSFLTRALPSSTTEGLDLLALLAGHQDVSSWVHQGRGLIGLGRALTITARGPERIEALRGAWRAVVHASWWRDPLVRPGTGPVALGSIAFSPASAQASVLLVPRILVGLDADGAWITTAVAEGQDHPGIERLLAAPHPGARTPPAPTAVATPAMPAPAPGAPRQGTLSPQEWQAAVVTAQERMRRGEAHKVVLARDVLIDPPPAMTTGDLLAHLGRAYPTCWTFAVDGMVGASPEMLVRLEGRRLFSRVLAGTARIPRGLEPQQRARAVAGLAAWLRDSGKNTREHALARNSVLQALEPLCSVVEAQEPHVLELPNVLHLASDVRGVVAGDTGALSLVGALHPTAAVGGTPTAAATSIIESVEGMDRGRYAGPVGWVDWHGEGQWCIALRSAQLGARPGDPLRAFGGCGIMPDSDPADELAETEAKMRPVLEALAALA

SEQ ID NO: 93183 - protein, 419 aa, Actinomyces coleocanis
  misc_feature (1)..(419): tr|C0VYW4|C0VYW4_9ACTO Isochorismate synthase OS=Actino myces coleocanis DSM 15436 OX=525245 GN=HMPREF0044_0354 PE=4 SV=1
MKLRIQPTTTVNGLAHALTTHFPTPPGTQLDSSQLSIWHGPALMDANQPLLIGYGNSIQFPATLQTANTTWTTARDTLSPTDDSLSFEEFFSQSHLQAPIGFFSFGFNQETPGIIQIQQRTFVQTSAGAWLLEIEGDTPLTFVPIPGVDPVFNLIDDTQASWLTSVTGLVQDLQAGVAQKTVLARDVIIQSSTPIDLSLVLRKLADAYPTCWQFAVAGLAGATPEMLADVRLGLVRSRVLAGTCTPGNEADLVDSIKDLTEHRFAADSVKDALAPLCTQLSANQKPFILQLPNVSHLATDVQGELAETTVSEGAPLISVLQKLHPTAAVCGTPREVAFELIAKHETTLRGRYAGPVGWMDAAGNGAAGLALRCGQLQADKQSMQLLAGCGIMPDSNPEAELAETRAKLRPMLSVFGLVS

SEQ ID NO: 93184 - protein, 462 aa, Actinomyces hordeovulneris
  misc_feature (1)..(462): tr|A0A3P1WH19|A0A3P1WH19_9ACTO Isochorismate synthase O S=Actinomyces hordeovulneris OX=52770 GN=EII13_05620 PE =4 SV=1
MPATSAGCLSREALMAPIVAGRQPRWHPATLEPMNTAPVLHAATVDITDHPALPCDLLELASPSPTTVTWLRDGDGFVGVGRVADHQANGAGRFAELSAWWRAVAAQAHNDDPVQLFGSGLLACGSVAFAPTSERRSRLVVPRVVVGRRAGRAWLTVIDSAPVASPRPDAVLAQLRAAHTPPTTPSAPRTRPGALRRSQWQAAVGEAIELLRAGKLAKVVLARDLAIDFAAPLDVRSPLGSLTRTYPNCWTFAIDGLLGATPEMLVRLDQGLVTCRVLAGTIHRTGDDDADAARAGSLARSSKNLAEHEYAVQSVADALASHCATLYVPEHPFVLQLANVMHLATDVTGVLPAGSPTSCLQLAAALHPSAAVGGTPRAAALAQIARLEKMDREAYAAPVGWLGADGDGEWGIALRCGQLSPDGRSLRLFAGGGVLAESDPAAELAETEAKMRPMLTAVGLAH

SEQ ID NO: 93185 - protein, 452 aa, Actinomyces howellii
  misc_feature (1)..(452): tr|A0A448HJE9|A0A448HJE9_9ACTO Isochorismate synthase e ntC OS=Actinomyces howellii OX=52771 GN=entC PE=4 SV=1
MAACLSLAARDLLERPPRLTFTTTELTGAPWAAPGPPLSLLAGRDDVVAWVRHGQGLVGWDPVLRIEATGPGRIEELRAAWRAVVHASWWSDPLVRPGTGPVALGAITFSPSSSERSVLLVPGVLVGRDARGSWVTTVRARGQDPDGGLDLRALTAAAAASRGVPQAPGARVTPGARSEASWRAAVAQASARLRAGEADKVVLARDVTAVPRATGTTGDLLGRLAAAYPSCWTFAADGMVGATPELLVRLRDRRLSSRVLAGTARRRRAGGDQPADEPSALAAWLEADPKNNREHALARASALSSLEPLCSVVEAPERFVLTLPNVLHLASDISGVVAGDTGALALVGALHPTAAVCGTPTPAAARLIDELEGMDRGRYSGPVGWVDWHGEGEWCIALRAAQLAEGGRTGTGPQAPVRVLGGGGIMPSSDPADELAETAAKMRPVLDALGAP

SEQ ID NO: 93186 - protein, 502 aa, Actinomyces israelii; identical to SEQ ID NO: 93181
  misc_feature (1)..(502): tr|A0A3S5EJ30|A0A3S5EJ30_9ACTO Isochorismate synthase d hbC OS=Actinomyces israelii OX=1659 GN=dhbC PE=4 SV=1

SEQ ID NO: 93187 - protein, 450 aa, Actinomyces johnsonii
  misc_feature (1)..(450): tr|A0A508A4A5|A0A508A4A5_9ACTO Isochorismate synthase O S=Actinomyces johnsonii OX=544581 GN=FK256_02485 PE=4 S V=1
MRADHCLAAPPRLSFRTHELPEGSLEGVALIDLLAGREEVVSWVHEGRGLIGLRRALTIEAHGDERIEALRAAWRSVIGTAWWRDALVRPGTGPVALGAITFSPASEQSSVLMVPEVLIGLDDDGAWLTTAVSAATGGVEPEHPDPEALIKALVTEARTAIGREHEDGDAGATAVEAGALSEEQWCRTVARTQERMRSGQARKVVLARDVLARPTAPLATGTVLRRLASDYPSTWTFAVDQMVGASPELLLRLRDRRLTSRVLAGTARRRAGEDAPATARLAAWLEGSEKNNREHELARASAITALEPLCSVVNAPARFVLSLPNVLHLASDVTGVVAGDTGALALVDALHPTAAVCGTPTPAAARLIEEAESMDRGRYAGPVGWVDWHGEGEWCIALRSAQLPAGGPGPHSPARVFGGGGIMPDSEPADELAETTAKMRPVLGALGVSP

SEQ ID NO: 93188 - protein, 453 aa, Actinomyces naeslundii
  misc_feature (1)..(453): tr|J3JK06|J3JK06_ACTNH Isochorismate synthase OS=Actino myces naeslundii (strain ATCC 12104 / DSM 43013 / JCM 8 349 / NCTC 10301 / Howell 279) OX=1115803 GN=HMPREF1129 _2191 PE=4 SV=1
MRADHCRDAPPRLSFRTHELPEEALEGLALIDLLAGREDVSSWVHEERGLIGLGRVLVIEAHGAERIEALRAAWRATVGAAWWRDALVRPGTGPVALGTISFSPASRQPSVLVVPKALIGLDDEGVWLTTVVPAPSGEAEPEHPDPEALIKALVVEARAAIGQERTGSDKDSGGTTAVETGALSEEQWCRAVAGTQERMRAGHARKVVLARDVLARPPAPLATGTVLRRLASDYPSTWTFAVDQMVGASPELLLRLRDRRLISRVLAGTARRHAGEDALATARLAAWLEGSEKNNREHELARASAITALEPLCSVVEAPARFVLTLPNVLHLASDVTGVVAGDTGALALVDALHPTAAVCGTPTPAAARLIEEVESMDRGRYAGPVGWVDWHGEGEWCIALRSAQLPTGGPGPHSPTRVFGGGGIMPDSDPTDELAETIAKMRPMLGALGVRW

SEQ ID NO: 93189 - protein, 456 aa, Actinomyces oris
  misc_feature (1)..(456): tr|A0A508BGL4|A0A508BGL4_9ACTO Isochorismate synthase O S=Actinomyces oris OX=544580 GN=FK267_05745 PE=4 SV=1
MRAEHCLAAPPRLSFRTHELPEGALEGLALIDLLAGREDVSSWVHEGRGLIGLGHVLVIEASGADRIEALRAAWRAVVGAAWWRDALVRPGTGPVALGAITFSPSSEQSSVLVVPEVLVGLDDSGAWLTTVVSGADDGSEPEHPDPGSLLTALVADARASVDREQAGTDRDSGDSGGTTAVEAGALSEEQWCRAVCATQERMRAGQARKVVLARDVLAYPGGPLATGTVLRRLASDYPSTWVFAVEQMVGASPELLLRLRDRRLMSRVLAGTARRHAGEDALATARLASWLEGSEKNNREHELARDSAITALEPLCSVVEAPARFVLTLPNVLHLASDVTGVVAGDTGALALVDALHPTAAVCGTPTQAAARLIEEAESMDRGRYAGPVGWVDWHGEGEWCIALRSAQLPTGGPGPQSPARVFGGGGIMPDSEPVDELAETTAKMRPMLGALGVPD

SEQ ID NO: 93190 - protein, 467 aa, Actinomyces slackii
  misc_feature (1)..(467): tr|A0A3S4UQI8|A0A3S4UQI8_9ACTO Isochorismate synthase d hbC OS=Actinomyces slackii OX=52774 GN=dhbC PE=4 SV=1
MTGHPIAAHPGPTLTAAHCQAAPPALSFTTTPIREQGLSLPALLAGRDDVVSWLHQGRGLIGMGHALTIEARGPERIEELRSAWRATIGAAWWRDPLVRPGTGPVAMGTITFSPASRERSALIVPSVLIGHDTHGAWLTTVVPAGQPHPSPEAIMAALHPQQPGPQPRADSPGPQPGSLSEQDWCRAVLTVQERMRAGQADKVVLARDVVLPGPHPATGDLLARLAHSYPTCWTFAVDGMVGASPEMLLNLEGRRLFSRVLAGTARRNQGTPTQDLAHWLAGSAKNTREHALARASALEALEPLCSVVEGGEPFVLELPNVLHLATDITGVVAGDTGALSLLGALHPTAAVGGTPTAAATAIIEQVEGMDRGRYAGPVGWVDWHGEGQWCIALRSAQLPQGGSTASGETGIRVFGGCGIMPDSDPVDELAETQAKMRPILEALAAPTHSAHAAHATPSAHATHPAPR

SEQ ID NO: 93191 - protein, 453 aa, Actinomyces sp.
  misc_feature (1)..(453): tr|A0A4P8ZHH9|A0A4P8ZHH9_9ACTO Isochorismate synthase O S=Actinomyces sp. oral taxon 171 str. F0337 OX=706439 G N=FBF36_10535 PE=4 SV=1
MRAEHCLADPPRLSFRTHELPEGALEGLALIDLLAGREDVSSWVHEGRGLIGLGRVLVIEAAGADRIEALRAAWRAVVGAAWWRDALVRPGTGPVALGVITFSPASQQSSVLVVPEVVVGCDGSGTWLTTVVPVAADGAEPEHPDPEIRLGAMVAEARTVIGREQSGDDGDSGGTTTVEAGALSEEQWCRAVSATQERMRAGRARKVVLARDVLAYPGAPLATGTVLRRLARDYPSTWVFAVDQMVGASPELLMRLRDRRLISRVLAGTARRHAGEDALATARLASWLEGSEKNNREHELARDSAITALEPLCSVVEAPARFVLTLPNVLHLASDVTGVVAGDTGALALVDALHPTAAVCGTPTQAAARLIEEAESMDRGRYAGPVGWVDWHGEGEWCIALRSAQLPAGGPGPQSPARVFGGGGIMPDSEPVDELAETIAKMRPMLGALNVRL

SEQ ID NO: 93192 - protein, 470 aa, Actinomyces succiniciruminis
  misc_feature (1)..(470): tr|A0A1L7RHP9|A0A1L7RHP9_9ACTO Menaquinone-specific iso chorismate synthase OS=Actinomyces succiniciruminis OX= 1522002 GN=AAM4_0314 PE=4 SV=1
MGAPGPAPDSSAHPAPAAPALSAVQAAAAPPHLSFRTVALPAGVITPEGGDGGTGLLDLLAGREDVVSWVRHGRGLVGWGQALRLEAQGPDRIEALRSAWRATVYASWWRDALVRPGTGPVALGAIAFSPASAAVSVLTVPRVLVGLDDFGAWLTTAVADGEAHPEVAEVLARLRPPASAQTDVPSPEAPVVSAGALPEADYLAAVAEVRRRIAAGEARKVVLARDLLVRPAAPLATGDLLRRLGANYPPCWTFAVDSMVGATPELLVRLENRRLASRVLAGTARRHPGDAATREREAERLAQWLAASAKNRAEHEFARASALSSLEPLCSVVEAAAPRVLTLPNVLHLATDITGVVAGDTGALSLVGALHPTAAVCGTPTAAAARVIAEVEGMDRGRYAGPVGWVDWHGEGEWCIALRSAALPPGGAGPEAPARVFGGGGIMPESVPADELAETTAKMRPMLTALGADV

SEQ ID NO: 93193 - protein, 453 aa, Actinomyces viscosus
  misc_feature (1)..(453): tr|A0A5F0KQ22|A0A5F0KQ22_ACTVI Isochorismate synthase O S=Actinomyces viscosus OX=1656 GN=E4J66_07340 PE=4 SV=1
MRAEHCRVASPRLSFHTHELPEDALEGLTLIDLLAGRADVSSWVHEGRGLIGLGRVLVIEAHGADRIEALRAAWRAVVGAAWWRDALVRPGTGPVALGAITFSPASKQSSVLVVPEILVGLDDSGAWLTTVVPEADDGTEPEHPDPEMLLRAMVAQARAAVDRERAGDARDSGGAAAVETGALSEEQWCQAVSTTQERMRTGQARKVVLARDVLVGPSRLLATGTVLRRLARDYPSTWVFAVDQMVGASPELLLRLRDRRLISRVLAGTARRHAGEDALATARLASWLEGSEKNNREHELARESAITALEPLCSVVEAPARFVLTLPNVLHLASDVTGVVAGDTGALALVDALHPTAAVCGTPTQAAARLIEEAESMDRGRYAGPVGWVDWHGEGEWCIALRSAQLPPEGPGPQSPARVFGGGGIMPDSEPVDELAETTAKMRPMLGALGVPG

SEQ ID NO: 93194 - protein, 492 aa, Actinomycetales bacterium
  misc_feature (1)..(492): tr|A0A1R4FEJ3|A0A1R4FEJ3_9ACTO Menaquinone-specific iso chorismate synthase OS=Actinomycetales bacterium JB111 OX=1434822 GN=CZ771_06920 PE=4 SV=1
MDHRNTAAPVRYARDAVWVRAGVGLRGSGGTRIALTGPRRLARLAEIWRRLEAASSDPDVSPVAFVGSTFVEDSAVSSILHVPASVRRVGEEGEWTQFVSSQALADALAADAEGLGEHAAHAARELPDGDLGLTRDEDDEETGDTLPPPSAVKSRGAKRYTRLVKRVLTRIAAGEAEKVVTSRAVDLTVTPDVLGALPATLAEAYPNAWTFAVGGLVGATPEMLAARDGDRVTSRVLAGSLPRGTRPDAELRAELTGSERFAAEHAHAARSVIDGLARVLTLENADPEPFVLELPNILHLATDVIGTPTGEIGLLDVLDGIHPTAAVGGTPTDAALAIIADLETHDRGRYAGPVGWLDAAGDGEIGLALRCGQVDGHSIRLYAGGGIVAGADPAAELAETEGKLRPMREALGDATAAPDGDTTSASEGDTAAPDGDATAAPDGDATSASEGDTAAPDGDATAAPDGDATPAPEGDTTPAPNGDTTPAPDGDE

SEQ ID NO: 93195 - protein, 436 aa, Actinoplanes sp.
  misc_feature (1)..(436): tr|G8SM61|G8SM61_ACTS5 Salicylate synthetase OS=Actinop lanes sp. (strain ATCC 31044 / CBS 674.73 / SE50/110) O X=134676 GN=trpE PE=4 SV=1
MTRHYRTAVIETSDEPIACALAVADLFDDYVVYEAPDGWYVAGGWAAEVVVGPRTVRCVHDGQVTETPWDDDPLVPVRRFLDGLPLAGWRAYGWCAFELGAAIAGLEPPEDVLAHFLIPTVETRLRGTQATVRGLTAEDLALVERRLTTPVRRAGRAAGRARVDLGAGTAEYQDAVATLVGDIRAGKLEKAVLSRVIGVPEKIDFPASFEVGRRRNTPARSFLLDMRGLQVFGFSPEIVLSVDADGTVVSQPLAGTRALSGDAETDERLRHQLRTDPKEIHEHAISVRVAVEELHEPCRPDTIAVSEFMAVKERGSVQHLGSQVTGRLAEGRDAWSALAAVFPAVTASGVPKQAAYEAISRLEGQRRGPYAGAVVTVGADGTMDAALVLRSAYSRDGVTWLRAGAGVVGQSRPERELEETREKLGCIAGYLVVSEG

SEQ ID NO: 93196 - protein, 379 aa, Actinosynnema pretiosum
  misc_feature (1)..(379): tr|A0A290ZGQ0|A0A290ZGQ0_9PSEU Isochorismate synthase O S=Actinosynnema pretiosum OX=42197 GN=CNX65_13830 PE=4 SV=1
MGAAVNAVHANATGAASGAAHADAMGAVGGGARGAAGSEAGSGAPGAANSGSPDAINNGLPGAANNGTTGAPGSDTPVNSTPRASHSALPSAPGWRVSPSPSPAAYADAVARALEMIGAGELAKVVVARALDVTAPHRLEVPELLARLVAADPAAHAFAIDVSAPGDPATRTLVGASPELLVSRRGDRVVANPLAGSLPRTGDPVEDARRGAALLASAKDLAEHEHVSAQVAGVLGRFCAELDVPAPVVIATPTMLHLSTTITGRLTDPDDPASSALGLAEALHPTPAVCGVPTERAARAITALEPRERGYYAGLVGWTDLAGDGEWVVTIRCAEVCGDTARLFAGAGVVAGSSPSAEVVETGAKFGTMLRALGLGDVA

SEQ ID NO: 93197 - protein, 417 aa, Adhaeribacter sp.
  misc_feature (1)..(417): tr|A0A369QH34|A0A369QH34_9BACT Isochorismate synthase O S=Adhaeribacter sp. HMF7616 OX=2072847 GN=entC PE=4 SV= 1
MISALPIELENSRVNLEGDSNVILKALFATAIRFHLPVAVWRLPNTSEIKLCVSLRPAQTSGDVPQLESGVSGFAFYPFQVSATYPAHFIKADITYSSLSAKLKFNFKLNENPEYVALVQRLQEYFEKIKGSAHTSNWHVSRKVKPYQTSEANFKHLVEESVAAIDAGQMEKVVLSRVRSTELTAGFDLMATYLRLQKTYPNAFVSLVSIPEMGTWMGASPEILVQVSKDRIFKTVALAGTQALTPDCNPAKALWQQKEIEEQSLVKRYILHCFKRIQLRDYTEIGPRTVVAGNLMHLRTDFTVDMKKEAFPMLGTHMLQLLHPTSAVCGMPKETAMEFIMQKEGYDRAYFSGFLGPVHIDGESNIYVNLRCSQLLEQVALTYAGAGITAESEPDKEWLETRLKMDTIRQVFQNSAL

SEQ ID NO: 93198 - protein, 427 aa, Adlercreutzia equolifaciens
  misc_feature (1)..(427): tr|A0A3E2EH33|A0A3E2EH33_9ACTN Isochorismate synthase O S=Adlercreutzia equolifaciens OX=446660 GN=DX903_10085 PE=4 SV=1
MTRIYTCNVPIEADLVDAFCWLQKGFTDQFVYYDKQRACRYMGLGRCIALPSLRDVEYEYGEGSSLHEVAAGEDAAEQPPVFFSFNRFDATNPAPADELMASFPRLRFMLPEIVLIENERGRFLQVNSLGPVYPGRVARFTRMVAAAPPRQRATVPFALEPDSREAWGEAMDAALAAIGEGRVSKVVLSRRLRLLAEHPFSSKDLLVNLIDGDARGTVLLYRYADVFFCGCTPELLVRKRGDVVESMCLAGTCPAGATAAESDALAEALLADGKNRAEHDYVVQLIRSVLDRVCYDVDVPAVPEIMRLAHVQHLFTPARARVLAGITLADLMEDLHPTPAVAGTPVGEAKMLLRAIEPYNRGFYAGACGFVDGAGDGEFSVALRTGVFDGEMGYVYGGCGIVGESDADAEYEEIDLKLRTTLSAFGA

SEQ ID NO: 93199 - protein, 404 aa, Advenella kashmirensis
  misc_feature (1)..(404): tr|V8QVV2|V8QVV2_9BURK Isochorismate synthase OS=Advene lla kashmirensis W13003 OX=1424334 GN=W822_02350 PE=4 S V=1
MSSETPIPGKPSDNNINAANREADQWLIDDFRVGDFFFASPDRQFRGSRKDVAVVSYQPASAETIHALFDQARQRGVAEPVMFGLVPFDVSRRASLAIPSHVDNAPVPNERVRQSDQSGRPQVANQKPVPEPEQYGEMVRKALGLMSEEGLRKIVLSRTMEVTLDRPLEYARLLPDLLSRNAHGYTFAIPVWDADGQTQPVGMMVGASPELLVRRVGDTIHVNPLAGSIGRNPDPSRDQQLKDGLAVSEKDLREHSYVVNDIARILREHCVDLDIPERPSVIGTDTLWHLSTYITGRLRNPEMTALELACELHPTPAICGYPTATAFSHLPDLEPFDRGYFAGLVGWQQANGDGEWALSLRCAQQTGEDTLRLFAGAGIVTGSNPDHEILETATKMETFMRAIR

SEQ ID NO: 93200 - protein, 355 aa, Aequorivita antarctica
  misc_feature (1)..(355): tr|A0A5C6Z256|A0A5C6Z256_9FLAO Isochorismate synthase O S=Aequorivita antarctica OX=153266 GN=ESU54_02760 PE=4 SV=1
MDYNLLIEKLLKHHSKNLPFVVFSLPESNSMNAFFQKDMQLCTVNKLTENGFVFAPFDYKDTTFFIPENDSESLQCEFINHNIELTSVTVSDDIEEKESYIKLVDKAIEAIKKRSANKIVVSRQKDFELKDFSIEKLIERLFSSYPTAFRYIWYHPNTGLWCGATPETLVQIENNSFKTMALAGTQPFTNRVPVFWGSKELDEQQLVTDVIIDSLQRVTSVLKVSNPFTYQAGSLLHLRTDITGVLKNGKATLTTITAALHPTPAVCGSPQKFANEFILENEGYNREFYTGFLGPILENGQSASLMVNLRCMKIEGNIAHVFVGGGITLGSQPQDEWNETQNKMQTMLQVLQPML

SEQ ID NO: 93201 - protein, 355 aa, Aequorivita lipolytica
  misc_feature (1)..(355): tr|A0A5C6YQL5|A0A5C6YQL5_9FLAO Isochorismate synthase O S=Aequorivita lipolytica OX=153267 GN=ESV24_07435 PE=4 SV=1
MDFHLLIKKISKQLKDELPLVVYSFPQQNTVTALLQKTNELFDISEFNANGFVFAPFDYKNSTCFIPESNSEKLQSELIESEINLASVKVNEDNSEEKIHLQLVQKAIENIKRRNANKIVISRPKDFPLRNFSFELLLTRLFSAYPTAFRYIWYHPQTGLWCGATPETLVQVENDSFKTMALAGTQPFTNRKPVIWGPKELDEQQLVTDAITNSLQRVTSVLKVSNPHTHRAGSMYHLRTDITGILKRGKATLTKIAAALHPTPAVCGTPPKFAKEFILQNEGYNREFYTGFFGPIQENGATAMLLVNLRCMKIENNTARIFVGGGITIGSQAKEEWEETQNKMQTMLQVLAPML

SEQ ID NO: 93202 - protein, 354 aa, Aequorivita sp.
  misc_feature (1)..(354): tr|A0A410FZS4|A0A410FZS4_9FLAO Isochorismate synthase O S=Aequorivita sp. H23M31 OX=2494375 GN=EI546_01545 PE=4 SV=1
MDFKTLIEKVSLQYEKKLPFVIFSKTSSETVRCYCQQNDNLYIDDSLSNNGFVLSPFDSRLESYLIPKNESESFETYFKISEIEKERVEVSELESDRIAYEEFISETIDTIQKGDAAKIVVSRKKDFQLSDFSIASLVERLFSAYPTAFRYVWFHPKTGIWCGATPEILVNIEQNKFRTMALAGTQPYTSGEITWRKKEMEEQHFVTEAILENLNGIVNDIEVSETRNHRAGSLLHLCTDISGKLGEEEGALAKIAWALHPTPAICGTPQKYARDYIIENEGYPREFYTGFLGPIEEDNASATLMVNLRCMKIENETASIFVGGGITADSHPEEEWKETQNKMQTMLQVLQPML

SEQ ID NO: 93203 - protein, 355 aa, Aequorivita sublithincola
  misc_feature (1)..(355): tr|I3YYH0|I3YYH0_AEQSU Isochorismate synthase family pr otein OS=Aequorivita sublithincola (strain DSM 14238 / LMG 21431 / ACAM 643 / 9-3) OX=746697 GN=Aeqsu_2583 PE= 4 SV=1
MDLNLMIEKISNHYNEKLPFVVYSLPQSGSISVLLQKNDSLNTIENLGGNGFVFAPFEYKGFSYFIDENDSEKHQFDFKSEAIESISVAVSEDISEQNTYIKLLSKTIETIKGSRANKIVISRFQNFQLKDFSIEKLIIQLFSKNPTAFRYIWYHPKTGLWCGATPETLVQIENKSFKTMALAGTQPFTNQEPVIWGVKEEYEQQLVTDAIINSLQRVTSVLKVSKTYTHRAGSLLHLRTDISGVLRTGEATLAKIAKALHPTPAVCGSPQQFAQQFIIENEGYDREFYTGFLGPILDDGNTASLMVNLRCMKIDDNQARIFVGGGITLASQPQEEYEETKNKLQTMLQVLQPML

SEQ ID NO: 93204 - protein, 473 aa, Aeribacillus composti
  misc_feature (1)..(473): tr|A0A559UR25|A0A559UR25_9BACI Isochorismate synthase M enF OS=Aeribacillus composti OX=1868734 GN=menF PE=3 SV =1
MVSIPCSDTLRDKVANAVNHVKKYSHPIILSYVFEIKEKDPLQIFSSFQSAYAGKRFYWATPDRTFILCGIGVELELTTDKKFSNRFFDIYSKWKDWKEHIQIEGAHPIGTGPLLFGGFSFDPLKNANSSKWKPFHEARFTLPSFMITKIGRHTLATINRLIQSTDDINEIINHFNTYEYTLKKKNENTNSFLNFTIKKESLFYKKEWMAAVEKATEQIKQNRFEKVVLAREMLLEFEGSIDIHYVLSMLNEHQPNCYLFVVENEGKTFVGATPERLVSKRDQKVQSACVAGSIKRGKTVEADEEYAQMLLSDTKNIHEHQIVVKAIEKVFREYCQEVQLQNNPTILKTPNIQHLYTPVEGTVKKGFTLIDFVEKLHPTPALGGYPKDAALAFIRNEEPLERGWYAAPVGWMDDQDNGEFVVAIRSGLLDEQKAYLYAGCGIVGDSKPEEEYRETEIKFGPMQHALGGKLNEK

SEQ ID NO: 93205 - protein, 478 aa, Aeribacillus pallidus
  misc_feature (1)..(478): tr|A0A223E5D6|A0A223E5D6_9BACI Isochorismate synthase M enF OS=Aeribacillus pallidus OX=33936 GN=menF PE=3 SV=1
MEGSSLVSIPCSDTLRDKVANAVNHVKKYSHPIILSYVFEIKEKDPLQIFSSFQSAYSGKRFYWATPDRTFILCGIGVELELTTDKKFSNRFFDIYSKWKDWKEHIQIEGAHPIGTGPLLFGGFSFDPLKNANSSKWKPFHEARFTLPSFMITKIGRHTLATINRLIQSTDDINEIINHFNTYEYTLKKKNEDTNSFLNFTIKKESLFHKKEWMAAVEKATEQIKQNRFEKVVLAREMLLEFEGSIDIHYVLSMLNEHQPNCYLFVVENEGKTFVGATPERLVSKRDQKVQSACVAGSIKRGKTVEADEEYAQMLLSDTKNIHEHQIVVKAIEKVFREYCQEVQLQNNPTILKTPNIQHLYTPVEGTVKKGFTLIDFVEKLHPTPALGGYPKDAALAFIRNEEPLERGWYAAPVGWMDDQDNGEFVVAIRSGLLDEQKAYLYAGCGIVGDSKPEEEYRETEIKFGPMQHALGGKLNEK

SEQ ID NO: 93206 - protein, 422 aa, Aeromicrobium camelliae
  misc_feature (1)..(422): tr|A0A3N6ZIE3|A0A3N6ZIE3_9ACTN Isochorismate synthase O S=Aeromicrobium camelliae OX=1538144 GN=EHW97_00085 PE= 4 SV=1
MSNPIADPSSVDDTAPLVVRTRRIDDPGDLLALLPPDQALAWVHGGDGLVAWGRAATFSTRGADRFADADAWWRAHVARSVSRDDVNRPGSGLVAFGSFAFADRGEGTTLVVPEVVVGRRDGVSWITTIGTTLSAPPTLTAHDDLGSGPAVDFEDDDSRRARWRDTVAAAVDRIAAGELDKVVLARSVDAVSDEVVDVRRPLRRLAAQYPSCWTFHVDGFFGSTPEMLVRLEGGLVTSRVLAGTIRRSGDDHRDLALAASLAHSSKDLEEHEYAVASVAEALAPHCTGMNVPEAPFVLHLPNVMHLATDVTGVLRADASALSLAAALHPSAAVGGTPRPAAVDLIEEIEGLDRARYAGPVGWIGADGDGEWGIGLRSAQLLDDGRRVRLFAGCGIVADSVPADELAESDAKLVPVRTSLTEA

SEQ ID NO: 93207 - protein, 419 aa, Aeromicrobium marinum
  misc_feature (1)..(419): tr|E2SF27|E2SF27_9ACTN Isochorismate synthase OS=Aeromi crobium marinum DSM 15272 OX=585531 GN=HMPREF0063_12636 PE=4 SV=1
MSNPAASETSAAHALLLVRTVEVPDPGALLDLLPPGPESLAWVHGQDGIVGWGRAAGLEVSGRWRFDEARRWWEQTVEHAVVRDEIGRPGSGLVAFGSFDFAADGSGALHVPAVVVGRRDGVCWLSVIGPTITAVPELAPAEPPHAPQGTDLQDGPVDAEQWMAVVAEAIARIGADRLDKVVLARERLARFERPLDVRWPLRRLAREYPACWTFHVDGFFGSTPEMLVRLERGLVTSRVLAGTIRRTGDDAHDAALAGSLARSSKDLEEHEYAVRSVTDALAPHCTAMSVPDAPFVLHLPNVMHLATDVTGVVRSHTSALTLAAALHPSAAVGGTPTPDAVRLIAEIERLDRGRYAGPVGWIGAGGDGEWGIGLRSAEITDDGLTARLFAGCGIVADSVPADELAESDAKFVPVRDALS

SEQ ID NO: 93208 - protein, 418 aa, Aeromicrobium sp.
  misc_feature (1)..(418): tr|A0A554SBG5|A0A554SBG5_9ACTN Isochorismate synthase O S=Aeromicrobium sp. Co35 OX=2590901 GN=FNM00_08680 PE=4 SV=1
MSNPVTDPRWEIEPLIVRTRRIDDPGELISLLPDSGQLAWVHGGDGLVGWGRAAQFGWTGPERFDEADRWWRTLANRAVVRDDIEAPGSGLVAFGTFTFSDHADGSLLVVPEVVVGRRDGVCWLTTIGRAITAAPALEAASPARAVAVALDDDDSRRATWRDIVATAVDRITADELDKVVLARSVDAVADEAIDVRHPLRRLAQEYPSCWTFHVDGFFGSTPEMLVRLEGGLVTSRVLAGTIRRSGDDHRDLALAASLARSSKDLEEHEYAVASVADALAPACTGMNVPESPFVLHLPNVMHLATDVTGVLREEASALSLAAALHPSAAVGGTPTTDAVELIEEIEGMDRGRYAGPVGWIGANGDGEWGIGLRSAQVLEDGSRVRLFAGCGIVADSVPADELAESDAKLVPVRTSLES

SEQ ID NO: 93209 - protein, 439 aa, Aeromonas allosaccharophila
  misc_feature (1)..(439): tr|A0A1Q5VQ45|A0A1Q5VQ45_9GAMM Isochorismate synthase M enF OS=Aeromonas allosaccharophila OX=656 GN=menF PE=3 SV=1
MLAQTHIKQQLDALRHSNVSGFVRLRVAIETRSFLGWLAAQTLYPRIYWQARGEDRPEYVALGAIHELTEPHAIKQVCANASQHHDDSPRYYGGLAFDPAQSGWQGFGPCRFVLPRIELVRRGECVSLCLNLWLDDHNLEAELQAAEAALDALRPEAPLPALQKQPWQRQDCPGPIQWQTLVERVTAPDFQAHTPKVVLSRESVLTSPNHDADINPWAMLGQWARHAQDCFHFGFQFSPEQAFIACSPERLYRREGSHLFTEALAGTIRRSGDEEVDAQLAAELLADSKNRLENRLVHADILSRLAPLAHDATLTEPRILKLRLLQHLKCDIEAELKPGVCDWQLLDALHPTPAVGGAPREAALAFIREFEPYDRGWYAGACGMLSRETSEFSVAIRSARIQSGSVTLFAGAGIVAGSEPVAEWAELDNKIANVLSLLG

SEQ ID NO: 93210 - protein, 443 aa, Aeromonas caviae
  misc_feature (1)..(443): tr|A0A2X4NSK6|A0A2X4NSK6_AERCA Isochorismate synthase M enF OS=Aeromonas caviae OX=648 GN=menF PE=3 SV=1
MLAQTHLKQQLDALRHSTVSGFVRLRVAAHVDVFPGWLAAQTLYPRIYWHARGQQSPEYVALGAIHELTRPEDIQRVCDLAGTASEDSPRYYGGLAFDPDLPGWQGFGPCRFVLPRIELVRRGECTSLCLNLWLPAREEGHAFEAELCAAEAALDALQPEAPLPALQKRPWQRQDLPGPAQWQTLVEQVTAPDFQARTPKVVLSRESLLQSEAHDAPLCPWSLLTQWARHAQECFHFGFQFSPEQSFISCSPERLYRREKGHLFTEALAGTIRRSGDEATDAALAAELLADSKNRLENRLVHADILSRLAPLTTDATLTEPRILKLRLLQHLKCDIEAELKPGVCDWQLLAALHPTPAVGGAPREAALAFIRECEPHDRGWYAGACGMLSRETSEFSVAIRSARIRGQRISLFAGAGIVAGSEPAAEWAELDNKIANVLSLLG

SEQ ID NO: 93211 - protein, 448 aa, Aeromonas dhakensis
  misc_feature (1)..(448): tr|K1J5V1|K1J5V1_9GAMM Isochorismate synthase MenF OS=A eromonas dhakensis OX=196024 GN=menF PE=3 SV=1
MLAQTHIKQQLDALRHGNASGFVRLRVAIEVRSFLGWLAAQTLYPRIYWHARGQDNPEYVALGCLRELTEPRAIRQVCEHTSQPHDDSPRYYGGLAFDPTQPGWQGFGPCRFVLPRIELVRRGECITLCLNLWLPEQTGGDAFEAELQAASAALDALQPEAPLPPLARHPWQREDCPSQPQWQTLVEQVTAADFQAHTPKVVLSRQSRLTHEGATNATEPQAVAPWSLLASWAQHGQDCFHFGFQFSPEQSFIACSPERLYRREQQHLFTEALAGTIRRSGDEATDAALAAELLADNKNRLENRLVHADILSRLAPLTTDASLTEPRILKLRLLQHLKCDIEAELKPGVCDWQLLEALHPTPAVGGAPREAALAFIREREPYDRGWYAGACGMLSRETSEFSVAIRSARITAQAITLFAGAGIVAGSEPAAEWAELDNKIANVLSLLG

SEQ ID NO: 93212 - protein, 438 aa, Aeromonas diversa
  misc_feature (1)..(438): tr|N9VBI4|N9VBI4_9GAMM Isochorismate synthase MenF OS=A eromonas diversa CDC 2478-85 OX=1268237 GN=menF PE=3 SV =1
MLAPTHLMQQLDALRHEATCGFVRLRVPTRVDSFLGWLSSQPLYPRIYWHARGDDRPEYAALGCIHEIRDPARLHALCDQTALPGADSPRYFGGLAFDPDGEGWPGFGPCRLILPRIELVRRGEEVSLCLNLLLCEDEREQEIARAEAALQMLCPERPLPPLAGGGYRRSDTPDFATWRSLVERVTDTDFQTHTPKVVLSRASRLETARPVGPWQMLESWRARAQDCFHFGFQFDPAQAFISCSPERLYRREGDHLFTEALAGTIRRSGDEATDSALARELLSDDKNRLENRLVHADILSRLAPLAKQTSLTEPRILKLRLLQHIKCDIEAELHAGVNDWQLLAALHPTPAVGGAPREAAIDFIRRHEPYRRGWYAGACGMLSRDTSEFSVAIRSALLDADSVTLFAGAGIVAGSEPSAEWAELDNKIGNVLSLLAQD

SEQ ID NO: 93213 - protein, 446 aa, Aeromonas encheleia
  misc_feature (1)..(446): tr|A0A448KRR2|A0A448KRR2_9GAMM Isochorismate synthase M enF OS=Aeromonas encheleia OX=73010 GN=menF PE=3 SV=1
MLAQTHIKQQLDALRHSHVSGFVRLRVAVEVQSFLGWLTAQTLYPRIYWQARGPKSPEYVALGRIHELSRPEDIRRVCDNTGTDSEDSPRYYGGLAFDPTQPGWPGFGPCRFVLPRIELVRRGECISLCLNLWLPAPERASEFDAELRAAEAALDALQPEAPLPPLHRQAWQREDCPSPALWQALVEQVTAPAAQAHTPKVVLSRESRLTPRDESDDRTALSPWSLLAQWAQHAQECFHFGFQFSPEQSFISCSPERLYRREGRHLFTEALAGTIRRSGDEATDAALAAELLTDSKNRLENRLVHADILNRLAPLTSRASLTEPRILKLRLLQHLKCDIEADLSPGVGDWQLLDALHPTPAVGGAPRESALTFIRAFEPYDRGWYAGACGMLSRETSEFSVAIRSALVREQTITLFAGAGIVAGSEPAAEWAELDNKIANVLSLLG

SEQ ID NO: 93214 - protein, 439 aa, Aeromonas enteropelogenes
  misc_feature (1)..(439): tr|A0A175VHY3|A0A175VHY3_AEREN Isochorismate synthase M enF OS=Aeromonas enteropelogenes OX=29489 GN=menF PE=3 SV=1
MLAQTHIKQQLDALRHNNVSGFVRLRVGIEVRSFLGWLAAQTLYPRIYWHARGQDRPEYVALGAIHELTEPDAIRQVCTNTSQYHDDSPRYYGGVAFDPAQPGWQGFGACRFVLPRIELVRRGECVSLCLNLWLTKENLESELAAAEAALDALQPEAPLAQLQKQRWQRQDCPEPAQWQRLVEQVTSPEFQAHTPKVVLSRESVLTSHQGGEDVCPWVMLNQWIGHAQDCFHFGFQFSPEQAFIACSPERLYRREDRHLFSEALAGTIRRSGDEATDAALAAELLADSKNRLENRLVHADILSRLAQLAHDATLTEPRILKLRLLQHLKCDIEAELKPGVCDWQLLEALHPTPAVGGAPREAALAFIRENEPYERGWYAGACGMLSRETSEFAVAIRSARIQPGSVTLFAGAGIVAGSEPAAEWAELDNKIANVLSLLG

SEQ ID NO: 93215 - protein, 448 aa, Aeromonas hydrophila
  misc_feature (1)..(448): tr|A0A2R4U0B0|A0A2R4U0B0_AERHY Isochorismate synthase M enF OS=Aeromonas hydrophila subsp. hydrophila OX=196023 GN=menF PE=3 SV=1
MLAQTHIKQQLDALRHGNASGFVRLRVAIEVGSFLGWLAAQTLYPRIYWHARGHDRPEYVALGCLRELTEPQAIRQVCEHTSQPHDDSPRYYGGLAFDPTQPGWQGFGPCRFVLPRIELVRRGECVTLCLNLWLPEQTGSDAFEAELQAAAAALDALRPEAPLPQLTPHSWQREDCPSQPQWQTLVEQVTAPEFQANTPKVVLSRQSRLTHDGATHAADPQAVAPWSLLASWAQHGQDCFHFGFQFSPEQSFIACSPERLYRREHQHLFTEALAGTIRRSGDEATDAALAAELLADSKNRLENRLVHADILSRLAPLTTDATLTEPRILKLRLLQHLKCDIEAELKPGVCDWQLLEALHPTPAVGGAPREAALAFIREREPYDRGWYAGACGMLSRETSEFSVAIRSARITAQAITLFAGAGIVAGSEPAAEWAELDNKIANVLSLLG

SEQ ID NO: 93216 - protein, 439 aa, Aeromonas jandaei
  misc_feature (1)..(439): tr|A0A3N6UV90|A0A3N6UV90_AERJA Isochorismate synthase M enF OS=Aeromonas jandaei OX=650 GN=menF PE=3 SV=1
MLAQTHIKQQLDALRHSKASGFVRLRVTFEIRSFLGWLAAQTLYPRIYWHARGQSSPEYVALGAIQELTAPEDIRQVCSNTAEPHDDSPRYYGGLAFDPTQPGWQGFGACRFVLPRIELVRRGECVSLCLNLWLTGDNLEQELHAAETALDALQPEAPLPPLQKQRWHRHDCPGPERWQTLVERVTAPDFQASTPKVVLSRESVLTSQHDAGQINPWAMLDQWANHAQDCFHFGFQFSPEQAFIACSPERLYRREERHLFTEALAGTIRRSGDEATDEALATELLTDSKNRLENRLVHADILSRLAPLAHDATLTEPRILKLRLLQHLKCDIEAELKPGVCDWQLIDALHPTPAVGGAPREAALAFIREFEPYERGWYAGACGMLSRETSEFSVAIRSARIQPGSVTLFAGAGIVAGSEPAAEWAELDNKIANVLSLLG

SEQ ID NO: 93217 - protein, 446 aa, Aeromonas lusitana
  misc_feature (1)..(446): tr|A0A2M8HD60|A0A2M8HD60_9GAMM Isochorismate synthase M enF OS=Aeromonas lusitana OX=931529 GN=menF PE=3 SV=1
MLAQTHIKQQLDALRHSTVSGFVRLRVAVEVHSFLGWLAAQTLYPRIYWQARGPARPEYVALGRIHELTRPQDIQRVCDNTGVDSEDSPRYYGGLAFDPTQPGWPDFGPCRFVLPRIELVRRGECVSLCLNLWLPKRERATEFEAELLAAESALDLLQPEAPLPPLHKQDWQREDCPSHAQWQQLVAQVTAPEFQAHTPKVVLSRESRLGADDAQDDQTAISPWSLLAQWAQHAQECFHFGFQFSPQQSFISCSPERLYRREGRHLQTEALAGTIRRAGDDAIDQALAAELLADSKNRLENRLVHADILSRLAPLATRTSLTEPRILKLRLLQHLKCDIEADLKPGVCDWQLLDALHPTPAVGGAPRESALAFIREHEPYDRGWYAGACGMLSRETSEFSVAIRSALIQDGAIRLFAGAGIVAGSEPAAEWAELDNKIANVLSLLG

SEQ ID NO: 93218 - protein, 443 aa, Aeromonas media
  misc_feature (1)..(443): tr|A0A023RQ71|A0A023RQ71_AERME Isochorismate synthase M enF OS=Aeromonas media WS OX=1208104 GN=menF PE=3 SV=1
MLAQTHLKQQLDALRHSTVSGFVRLRVAANVDLFPGWLAAQTLYPRIYWQARGPKSPEYVALGAIHELTRPEDIQRVCDLANTSSEDSPRYYGGLAFDPAQPGWQGFGPCRFVLPRIELVRRGECISLCLNLWLPAQDKVHEFDAELQAAEAALDALQPEAPLPSLQKRSWQRRDVPGPAQWQSLVERVTDPAFQAHTPKVVLSRESLLESEESIPPLCPWSLLTQWARHAQECFHFGFQFSPEQSFIACSPERLYRREHCHLFTEALAGTIRRSGDEATDAALAAELLADSKNRLENRLVHADILSRLAPLTTDATLTEPRILKLRLLQHLKCDIEAELKPGVCDWQLLAALHPTPAVGGAPREAALAFIRESEPYDRGWYAGACGMLSRETSEFSVAIRSARITAQGISLFAGAGIVAGSEPTAEWAELDNKIANVLSLLG

SEQ ID NO: 93219 - protein, 433 aa, Aeromonas molluscorum
  misc_feature (1)..(433): tr|R1F4P3|R1F4P3_9GAMM Isochorismate synthase MenF OS=A eromonas molluscorum 848 OX=1268236 GN=menF PE=3 SV=1
MLTQTHIKQQLDALRHDKACGLVRVRVAMEVDSFLGWLNAQTLYPRIYWHARGDDKPQYVALGCIRELTGPEQIQQIGTHGNQDESPRYYGGLAFDPEQHDWPGFGPCRFVLPRVELIRRGECVSLCLNLWFDEGNREAELTAALSALTALQPEAPLPSLQPQQWQRHDSPDFPQWQRLVATVTAPAFQTLTPKVVLSRESRLEGASVNPWSLLASWALQAEECFQFGFQFEPDEAFIACSPERLYRREQRHLYTEALAGTIRRSGDEMTDAQLAAELLGDGKNRLENRLVHADILQRLAPLTHDASLTEPRVLKLRLLQHLKCDIEAELHPEVSDGQLLAALHPTPAVGGAPREAALRFIRDHEPHARGWYAGACGMLSRETSEFSVAIRSALVRPHAVTLFAGAGIVAGSEPAAEWAELDNKIANVLSLLG

SEQ ID NO: 93220 - protein, 439 aa, Aeromonas rivipollensis
  misc_feature (1)..(439): tr|A0A2P1PBC9|A0A2P1PBC9_9GAMM Isochorismate synthase M enF OS=Aeromonas rivipollensis OX=948519 GN=menF PE=3 S V=1
MLAQTHLKQQLDALRHSNVSGFVRLRVAANVDLFPGWLAAQTLYPRIYWQARGPRSPEYVALGAIHELTRPADIQRVCDLANANSEDSPRYYGGLAFDPAQPGWQGFGPCRFVLPRIELVRRGECVSLCLNLWLTDGNLDAELQAAEAALDALQPEAPLPPLQKRPWQRQDVPGQAQWQTLVERVTAPAFQAHTPKVVLSRESVLTGQHGDAPLCPWSLLTQWASHAQECFHFGFQFSPEQSFISCSPERLYRRESGHLFTEALAGTIRRSGDEAADAALAAELLADSKNRLENRLVHADILSRLAPLTTDATLTEPRILKLRLLQHLKCDIEAELKPGVCDWQLLAALHPTPAVGGAPREAALAFIREYEPYQRGWYAGACGMLSRETSEFSVAIRSARITARGISLFAGAGIVAGSEPAAEWAELDNKIANVLSLLG

SEQ ID NO: 93221 - protein, 451 aa, Aeromonas salmonicida
  misc_feature (1)..(451): tr|T0PI50|T0PI50_AERSA Isochorismate synthase MenF OS=A eromonas salmonicida subsp. pectinolytica 34mel OX=1324 960 GN=menF PE=3 SV=1
MLAQTHIKQQLDALRHSNASGFVRLRVAIEVGSFLGWLAAQTLYPRIYWHARGHDKPEYVALGCIRELTRPQDIQQVCEHANQLHDDSPRYYGGLAFDPAQPGWQGFGPCRFVLPRIELVRRGECVSLCFNLWLPEQQAVAEFDAEMLAAEAALDALLPEAPLSPLLRRDWQRQDCPAQPHWQQLVERVTAPDFQAHTPKVVLSRESRLTLDDARTDATHNAGNAVSPWALLAQWAQHAQDCFHFGFQFSPEQSFIACSPERLYRREQDHLFTEALAGTIRRSGDEATDAALAAELLADSKNRLENRLVHADILSRLAPLTTGASLTEPRILKLRLLQHLKCDIEAELKPGVCDWQLLDALHPTPAVGGAPREAALAFIREFEPHDRGWYAGACGMLSRETSEFSVAIRSARVTAQTITLYAGAGIVAGSEPAAEWAELDNKIANVLSLLG

SEQ ID NO: 93222 - protein, 438 aa, Aeromonas schubertii
  misc_feature (1)..(438): tr|A0A0W7U4C4|A0A0W7U4C4_9GAMM Isochorismate synthase M enF OS=Aeromonas schubertii OX=652 GN=menF PE=3 SV=1
MLAPTHLMQQLDALRHEATCGFVRLRVPARVDSFLGWLSSQPLYPRIYWHARGDDRPEYATLGCIREIRDPARLDALCHQTSLSGADSPRYFGGLAFDPDGEGWPGFGPCRLILPRIELVRRGEEVSLCLNLLLDEGEREQEIARAKQALQALCPEHPLTPMQGQGYLRHDTPDFATWHNLVERVTAPDFQAHTPKVVLSRASRLETAHAVDPWQMLESWRARAQGCFHFGFQFEKEQAFISCSPERLYRREGHHLFTEALAGTIRRSGDEAIDAALAHELLSDNKNRLENRLVHADILSRLAPLAQQTSLTEPRILKLRLLQHLKCDIEAELHPGVEDWQLLAALHPTPAVGGAPREAAIDFIRRHEPYRRGWYAGACGMLSRDTSEFSVAIRSALLDANAVTLFAGAGIVAGSEPSAEWAELDNKIDNVLSLLAQD

SEQ ID NO: 93223 - protein, 438 aa, Aeromonas simiae
  misc_feature (1)..(438): tr|A0A5J6WY95|A0A5J6WY95_9GAMM Isochorismate synthase O S=Aeromonas simiae OX=218936 GN=FE240_15835 PE=4 SV=1
MLAPTHLLQQLDALRHDATTGFVRLRIPFVVDSFLGWLAAQPLYPRIYWHSRGAERPEYAALGSIHTLDDPQQLTALCKQIAEAGADSPRYFGGLAFDPTSPGWPGFGACRFVLPRIELVRRGEEVSLCLNLCLDASNREAELAAAEQALQALRPAQPLPPLPAQPFVRSDSPDPALWRTLVEQVTAPDFQAHTPKVVLSRASRLDSPIRVAPWSMLAAWRERAHDCFHFGFEFAPEQAFISCSPERLYRREGRHLFTEALAGTIRRSGDDALDAALAAELLADSKNRLENRLVHADILQRLAPLAEQTSLTEPRILKLRLLQHLKCDIEAALKPEVCDWQLLAALHPTPAVGGAPREAALDFIRHHEPYQRGWYAGACGLLSRDTSEFAVGIRSALLDAKSVTLFAGAGIVAGSEPAAEWAELDNKIGNVLSLLEQR

SEQ ID NO: 93224 - protein, 440 aa, Aeromonas sobria
  misc_feature (1)..(440): tr|A0A2N3J6X5|A0A2N3J6X5_AERSO Isochorismate synthase M enF OS=Aeromonas sobria OX=646 GN=menF PE=3 SV=1
MLAQTHIKQQLDALRHSNVSGFVRLRVAIEIRSFLGWLAAQTLYPRIYWQARGQDRPEYVALGAIHELTEPHAIKRVCANTASQHHDDSPRYYGGLAFDPAQSGWQGFGPCRFVLPRIELVRRGECVSLCLNLWLDDDNLEAELQAAEAALDALRPEAPLPALQKQPWQRQDCPGPAQWQTLVERVTSPDFQAHTPKVVLSRESVLTSPNHDADINPWAMLDQWARHAQDCFHFGFQFSPEQAFIACSPERLYRREGSHLFTEALAGTIRRSGDEEVDAQLAAELLADNKNRLENRLVHADILSRLAPLAHDATLTEPRILKLRLLQHLKCDIEAELKPGVCDWQLLDALHPTPAVGGAPREAALAFIREFEPYDRGWYAGACGMLSRETSEFSVAIRSARIQPGSVTLFAGAGIVAGSEPVAEWAELDNKIANVLSLLG

SEQ ID NO: 93225 - protein, 429 aa, Aeromonas sp.
  misc_feature (1)..(429): tr|A0A1N7BRI7|A0A1N7BRI7_9GAMM Isochorismate synthase M enF OS=Aeromonas sp. RU39B OX=1907416 GN=menF PE=3 SV=1
MQQLDALRHETTCGFVRLREPFRVVSMLGWLSSQPLYPRIYWHARGQDRPEYVALGAVHELTDSHGLNALCERTARTETDSPRYFGGLAFDPTTEGWPGFGPCRMVLPRIELVRRGEDLCLCLNLWLEPGKREAELDAAAGALQQLQPELPLPTLPAVSFERHDTPDFATWQSLVEQVTSAEFQAHTPKVVLSRASRLQTNIALDPWQLLDKWRARAQDCFHFGFQFSPDSAFVSCSPERLYRREARHLFTEAVAGTIRRTGDPHTDHALAAELMADSKNRWENRVVHTDILTRLTPLALHTQQAEPRILQLRLLQHIKCDIEAVLHPDVADWQLLSALHPTPAVGGAPRETALDFIRRFEPYERGWYAGACGLLSRDTCEFSVGIRSALLDAESITLFAGAGIVAGSEPYAEWDELDNKISNALSLLQ

SEQ ID NO: 93226 - protein, 395 aa, Aeromonas taiwanensis
  misc_feature (1)..(395): tr|A0A5F0K936|A0A5F0K936_9GAMM Isochorismate synthase O S=Aeromonas taiwanensis OX=633417 GN=DRM93_13600 PE=4 S V=1
MNTHVMDNGAPAEAKMSPDFLFTSGQGTISATDLGQPITTPACEWPLLAQQITLALDAAKAAGQTNPLLIGAFAFDPAEASCLYVPGRYKRGEKLAPTEPTPATEVEQTVEANRVISVQSTPPASEFQASVSAALDAFAQGRLSKVVLSRKLTLTLHQPADPKRVMTRLMAQNPHAFHFSLPLGQGRRLLGASPELLLRVSGGEVFTHPLAGSARRASEPAQDEMVARDLLASRKDQHEHKLVIDEIRRVLTPHCRELAIPSSPSLMSTDTLWHLGTPIAGRLHGGEASVLSLACQLHPTPALCGYPTELARQFIREKEPFRRALFSGIVGWCDSQGNGEWAVVIRCGVLDGRQVELFAGAGIVAGSDPAMEWAETGTKLGTMLKALGLDLEVAQ

SEQ ID NO: 93227 - protein, 440 aa, Aeromonas veronii
  misc_feature (1)..(440): tr|A0A1N6UB09|A0A1N6UB09_9GAMM Isochorismate synthase M enF OS=Aeromonas veronii OX=654 GN=menF PE=3 SV=1
MLAQTHIKQQLDALRHSNVSGFVRLRVAIEIRSFLGWLAAQTLYPRIYWQARGEARPEYVALGAIHELTEPHAIKQVCTNTANQHHDDSPRYYGGLAFDPAQTGWQGFGPCRFVLPRIELVRRGECVSLCLNLWLDENNLEAELQAAEAALDALRPEAPLPALQKQPWQRQDCPGPAQWQTLVERVTSPDFQTHTPKVVLSRESVLTSPNHDADINPWAMLDQWARHAQDCFHFGFQFSPEQAFIACSPERLYRREDRHLFTEALAGTIRRSGDEEVDAQLAAELLADSKNRLENRLVHADILSRLAPLTHDATLTEPRILKLRLLQHLKCDIEAELKPGVCDWQLLDALHPTPAVGGAPREAALAFIREFEPYDRGWYAGACGMLSRETSEFSVAIRSARIQPGSVTLFAGAGIVAGSEPVAEWAELDNKIANVLSLLG

SEQ ID NO: 93228 - protein, 440 aa, Agarivorans albus
  misc_feature (1)..(440): tr|R9PLN7|R9PLN7_AGAAL Isochorismate synthase MenF OS=A garivorans albus MKT 106 OX=1331007 GN=menF PE=3 SV=1
MRLTASQFQNAINQLRLLPQQGFQQVCIKLPKLDLLAWLNQQQHTTRGYWKNKRQQQVAFVGAAKSVLDLEQLQSVCDQLDPRNNQLRFYGGIAFARQSALWSSFPHRRFILPRFEIRCDGEYTRLFINANFEHQPELEYQRIEKAFAALKPVQALQHTPLKALSRQDQPSREQWQHLVKQVTSEDFQQHTAKVVLSRQTNLQLNAEINAFSLLQQWQQKERNCYSFLFQFDGVTSFLGCSPERLYSREGSQLVSEALAGTAPRGETSELDTQLGEQLLEDAKNKLENQLVVDDLTRRLKELSLHVRTLDNLELLKLDRVQHLKRRIQARISPALDDRSLLQALHPTPAVGGLPRSSAVQYILKNEGYARGWYAGAVGWLSGAQSEFSVAIRSALVTPQHLSTFAGAGIVAGSQAEQEWQELNHKIATVLQLVDKDLLLD

SEQ ID NO: 93229 - protein, 443 aa, Agarivorans sp.
  misc_feature (1)..(443): tr|A0A4D4ISC1|A0A4D4ISC1_9ALTE Isochorismate synthase M enF OS=Agarivorans sp. Toyoura001 OX=2283141 GN=menF PE =3 SV=1
MRLTASQFKIAINQLRQVPQQGFQQVCIKLPKLDLLAWLNQQQHTTRGYWKNKHKQQVAFVGAAKSILDLEQLQSVCDQLDPSNNQLRFYGGIAFARQSAQWSGFPHRRFILPRFEIRCDGEYTRLFINANFEHQPALEYQRIEKAFLALKPTQALPQVSLKALSRQDQPSRTQWQSLVDQVTSDDFQQHTAKVVLSRQTNIQLNAELNAFALLQQWQQKEQNCYSFLFQFDGISSFLGCSPERLYSREGSQLVSEALAGTAPRGITPEQDAQLGKQLLDDAKNQLENQLVVDDLTRRLKELSLHVRALDQIELVKLDRVQHLKRRIQARVSPALDDRSLLQALHPTPAVGGLPRSSAVQYILKNEGYARGWYAGAVGWLSGAQSEFSVAIRSALVTPQHLSTFAGAGIVAGSQAEQEWQELNHKIATVLQLVDEDALLESEH

SEQ ID NO: 93230 - protein, 434 aa, Aggregatibacter actinomycetemcomitans
  misc_feature (1)..(434): tr|H0KEM6|H0KEM6_AGGAC Isochorismate synthase MenF OS=A ggregatibacter actinomycetemcomitans RhAA1 OX=1089447 G N=menF PE=3 SV=1
MDSLQSIKAQLISQIHQLESEQHAISVCSAQIESNVNLLAWLKAQPHYPQCYFKLQQGESAFAATGEVCAFDQLAAAQHFIEHADFSLFGGMTFNGDTYFFLPQLLLEQTQNRLTVKVFIDHADFKESKQQALAVLKTLEKTTALLDVQSEAPRFHQQADQLRWQHWVEQALAQIRSGYVDKLVLANETTFHLNSPLNAQDFLAKSEAHNYGCYHFLLAKSPSSIFLGSTPERLYARHQRRLTTEALAGTALMTDDPAENRQQAQWLLQDGKNIHENQLVAEGICANLSAFAKQIQLGEIGLKPLRRVQHLRREITALLTENCTDLDCLKAIHPTAAVAGLPQQTAKTLLAQIENYDRSWYAGTLGFFNRARAEFCVTIRSAFIEADKIRVFAGAGIVEGSVPLLEWQEIERKAAGLISLLQITESKNGEKKCQ

SEQ ID NO: 93231 - protein, 435 aa, Aggregatibacter aphrophilus
  misc_feature (1)..(435): tr|A0A3S4PSR4|A0A3S4PSR4_AGGAP Isochorismate synthase M enF OS=Aggregatibacter aphrophilus ATCC 33389 OX=985008 GN=menF PE=3 SV=1
MDSLQSIKAQLINQINALQFDQNQKIAVCSAQVKCHMNVLGWLKAQQHYPQFYFKLQDTERSFVGVGAVRTFTQLDAAQAFVNQYQLPLFGGMKFYGETYFFLPQILLELDAQQLTVTVFIDQADSANSQLRALEGLKTFEKMTALLDVQVPLTLVNQQADESLWCNWVTRALAEIRQKQVSKLVLANAVTFSAPHRLNGKDFLAKSESYHTGCYHFLLAEDEQGCFLGSTPERLYARQARQLNTEALAGTALVSDNPEHNRAQADWLLQDEKNIYENQLVADGICTNLQPFVDKISVGNVGLKPLRQVQHLRREITALLKAECSDKDCLLAIHPTAAVAGLPQQKAKVLLRQIENYDRGWYAGTLGFFDHQQAEFCVTIRSAQLEENKIRIFAGAGIVEGSVPLLEWHEIERKAAGLISLLQITESKNGEKKCQ

SEQ ID NO: 93232 - protein, 435 aa, Aggregatibacter segnis
  misc_feature (1)..(435): tr|E6KW32|E6KW32_9PAST Isochorismate synthase MenF OS=A ggregatibacter segnis ATCC 33393 OX=888057 GN=menF PE=3 SV=1
MDSLQSLKTQLINQINALQLNQPHHIAVCSAQAECDVDLLGWLKAQPHYPQFYFQLQQTTQCFATIGAVRRFQQLDAAQDFVNQHNLPLFGGIQFYGQTTFFLPQLVLEQRDNQINVTVFIDQDNLIHNKDKALQVLKTFEKTTALLPLQSQADLIEQQANPTQWANWVEKALAQIHEKTVTKLVLANKSTFALNQPLNAKDFLAQSEIYNKGCYHFLFTQDDKTSFLGSSPERLYARHERHLKTEALAGTAPMSEDHEANRKQADWLLSDKKNIHENQLVADGICANLAPFTKHIEVGNLGIKQLRQVQHLRREITALLTDNCTDLNCLQAIHPTAAVAGLPQQKAKALLQQIEHYDRSWYAGTLGFFNQQQAEFCVAIRSAFVEADKIHVFAGAGIVEGSVPLLEWQEIERKAAGLISLLKITKSENGEQKCQ

SEQ ID NO: 93233 - protein, 435 aa, Aggregatibacter sp.
  misc_feature (1)..(435): tr|U1SFJ3|U1SFJ3_9PAST Isochorismate synthase MenF OS=A ggregatibacter sp. oral taxon 458 str. W10330 OX=132177 2 GN=menF PE=3 SV=1
MDSLQSIKTQLISQINALQLNQPHHIAVCSAQAECAVDLLGWLKAQPHYPQFYFQLQQTTQCFATLGAVRTFQQLDAAQDFVNQHNFPLFGGIQFYGQTTFFLPQLVLEQRDNQIQATVFIDQDNLIHNKDKALQVLKTFEKTTALLPLQSQADLIDQQANPTQWASWVEKALAQIHEKTVTKLVLANKSTFALNQPLNAKDFLAQSEIYNKGCYHFLFAQDDKTSFLGSSPERLYARHERHLKTEALAGTSPMNEDHESNRKQADWLLSDKKNIHENQLVADGICANLAPFTQYIEVGNLGIKQLRQVQHLRREITALLTDNCTDLNCLQAIHPTAAVAGLPQQKAKTLLQQIEHYDRSWYAGTLGFFNQQQAEFCVAIRSAFVEADKIHVFAGAGIVEGSVPLLEWQEIERKAAGLISLLKITKSENGEQKCQ

SEQ ID NO: 93234 - protein, 391 aa, Agrobacterium deltaense
  misc_feature (1)..(391): tr|A0A1S7U4N6|A0A1S7U4N6_9RHIZ Isochorismate synthase E ntC OS=Agrobacterium deltaense NCPPB 1641 OX=1183425 GN =entC PE=4 SV=1
MKTGALRTNDVESDEITEFNREFLFTSGSGQLRAKGIREKIAIPARGGEDIASPLQQALAGAFERAQREGQENPIAIGAIPFDVSEPSCLYIPYNYEWNSKDEEPIVADSAMPALVGQNSLPDESGFKHAVEHAIVNFRHSEVRKAVLSVMRELTFASEVNVERLLASLAKQNREGYQFRIPLPDGGDLIGVSPELLIRKQGEKIISNPLAGSAKRMVDPAADKANADRLSASEKDHYEHSLVIEDIRSLLSPVCAELDVPEKPSLINTAALWHLSTRIEGRLADPETNALQLACLLHPTPAVCGFPTERAHRLIRFVEPFERGLFTGMVGWTDSQGNGEWVVTIRCGTVQRETVRLFAGAGIVEASEPESEWAEVQTKLKTMLNACGLAA

SEQ ID NO: 93235 - protein, 391 aa, Agrobacterium genomosp.
  misc_feature (1)..(391): tr|A0A1S7N8Y4|A0A1S7N8Y4_9RHIZ Isochorismate synthase E ntC OS=Agrobacterium genomosp. 1 str. TT111 OX=1183430 GN=entC PE=4 SV=1
MKTGALRTNDVDSDEITDFDREFLFTSGSGELRARGIRERITIPAHGAEDAGSPLQKAIKAAFERARRAGQDNPIAIGAIPFDVNEPSCLYIPNNHESNPKGAASISTDSAMPALVGQNSLPDENGFKRAVEHAIVNFRHSDVRKAVLSVMRELTFASEVNVERLLASLAKQNREGYQFRIPLPDGGDLIGVSPELLIRKQGEKVISNPLAGSAKRMADPVADKANADRLSASEKDHYEHSLVIEDIRSLLTPCCTEIDVPEKPSLINTAALWHLSTRIEGRLADPETNALQLACLLHPTPAVCGFPTERARRLIRFVEPFERGLFTGMVGWTDAEGNGEWVVTIRCGTVQRQTVRLFAGAGIVEASEPESEWAEVQTKLKTMLNACGLSA

SEQ ID NO: 93236 - protein, 391 aa, Agrobacterium rhizogenes
  misc_feature (1)..(391): tr|A0A546XAP7|A0A546XAP7_AGRRH Isochorismate synthase O S=Agrobacterium rhizogenes OX=359 GN=EXN68_22005 PE=4 S V=1
MKTGALRTNDVESDEITDFNREFLFTSGTGQLRAEGIRERITLPARGGEDTASPLQQAIKGAFERARRAGQDNPIAIGAIPFDVSEPSCLYVPNNHEWSPRDAVPVATDSAMPALVGQNSLPDEAGFKHAVEHAILNFRHSEVRKAVLSVMRELTFASEVNVERLLASLAKQNREGYQFRIPLPEGGDLIGVSPELLIRKQGEKIISNPLAGSAKRMTDPVADKANADRLSESEKDHYEHSLVIEDIRSLLSPCCAELDVPEKPSLINTAALWHLSTRIEGRLADPETNALQLACLLHPTPAVCGFPTERAHRLIRFVEPFERGLFTGMVGWTDAQGNGEWVVTIRCGTVQHQTVRLFAGAGIVEASEPESEWAEVQTKLKTMLNACGLSA

SEQ ID NO: 93237 - protein, 391 aa, Agrobacterium salinitolerans
  misc_feature (1)..(391): tr|A0A546WM67|A0A546WM67_9RHIZ Isochorismate synthase O S=Agrobacterium salinitolerans OX=1183413 GN=EXN23_1484 5 PE=4 SV=1
MKTGALRTNDVESDEITEFNREFLFTSGSGQLRAKGIREKIAIPARGGEDIASPLQQALAGAFERAQREGEQNPIAIGAIPFDVSEPSCLYIPYNHEWNSKDAEPIVADSAMPALVGQNSLPDESGFKRAVEHAIVNFRHSEVRKAVLSVMRELTFASEVNVERLLASLAKQNREGYQFRIPLPDGGDLIGVSPELLIRKQGENIISNPLAGSAKRMVDPAADKANADRLSASEKDHYEHSLVIEDIRSLLSPVCAELDVPEKPSLISTAALWHLSTRIEGRLADPVTNALQLACLLHPTPAVCGFPTERAHRLIRFVEPFERGLFTGMVGWTDSEGNGEWVVTIRCGTVQRETVRLFAGAGIVEASEPESEWAEVQTKLKTMLNACGLSA

SEQ ID NO: 93238 - protein, 391 aa, Agrobacterium sp.
  misc_feature (1)..(391): tr|A0A427QJ03|A0A427QJ03_9RHIZ Isochorismate synthase O S=Agrobacterium sp. FDAARGOS_525 OX=2420311 GN=EGT36_25 500 PE=4 SV=1
MKTGALRTNDVESDEIADFNRDFLFTSGTGQLRAKGIRERITLPARGGEDTGSPLQQAIKAAFERARRAGQDNPIAIGAIPFDVSEPSCLYIPNNHEWSPRETAPVVADSAMPALVGHNSLPDETGFKRAVEHAIVNFRHSDVRKAVLSVMRELTFASEVNVERLLASLAKQNREGYQFRIPLPDGGDLIGVSPELLIRKQGENIISNPLAGSAKRMVDPAADKANAERLSASEKDHYEHSLVIEDIRSLLSPVCAELDVPEKPSLINTAALWHLSTRIEGRLADPETNALQLACLLHPTPAVCGFPTERAHRLIRFVEPFERGLFTGMVGWTDSEGNGEWVVTIRCGTVQRKTVRLFAGAGIVEASEPESEWAEVQTKLKTMLNACGLSA

SEQ ID NO: 93239 - protein, 391 aa, Agrobacterium tumefaciens
  misc_feature (1)..(391): tr|A0A1S7QIB7|A0A1S7QIB7_RHIRD Isochorismate synthase e ntC OS=Agrobacterium tumefaciens str. CFBP 5621 OX=1183 422 GN=entC PE=4 SV=1
MKTGALRTNDVESDEITEFNREFLFTSGSGQLRARGIRERIAIPARGGEDISSPLQQALAGAFERARRDGEQNPIAIGAIPFDVSEPSCLYIPYNHEWNSRDAAPIVADSAMPALIGQNSLPDETGFKRAVEHAIVNFRHSEVRKAVLSVMRELTFASEVDVERLLASLAKQNREGYQFRIPLPDGGDLIGVSPELLIRKQGEKIISNPLAGSAKRMVDPAADKANADRLSASEKDHYEHSLVIEDIRSLLSPVCVELDVPEKPSLINTAALWHLSTRIEGRLADPETNALQLACLLHPTPAVCGFPTERAHRLIRFVEPFERGLFTGMVGWTDSEGNGEWVVTIRCGTVQRETVRLFAGAGIVEASEPESEWAEVQTKLKTMLNACGLSA

SEQ ID NO: 93240 - protein, 418 aa, Agrococcus casei
  misc_feature (1)..(418): tr|A0A1R4G9S6|A0A1R4G9S6_9MICO Menaquinone-specific iso chorismate synthase OS=Agrococcus casei LMG 22410 OX=12 55656 GN=CZ674_10200 PE=4 SV=1
MHTPVALTARTEPFTGSAPLRYSDARNPLAFLKGDEGIVGIGETLRLTFTGRSRFADAAAAWAAICASATVDDPMQLPGTGLVAFGAFAFDDESQAESVLVIPQAVIGESGDDRWVTRITLDQEDSSAPLPDLLAETDIDEMRVDFTHGRISGAAYEGAVVGALEQIRTADVSKLVIARDLEGRLPAGGDLRSVIRGLRRRYPTAMAYAVDGLIGASPETLVRVRGGDLFTRVLAGTAARGATKPLDAEAAESLSASGKNSREHALAVESALASLAEVGVEPAESEPFTLQLPNLWHLATDITGSIGDATVFEVMDALHPTAAVGGTPTAEALPRIRRIEGLDRMRYAGPVGWVDAAGNATWAIALRGAEVAANGTIRAFAGAGIVEGSDPAAELRETEIKFRPIRDAFADPLPEDAS

SEQ ID NO: 93241 - protein, 403 aa, Agrococcus lahaulensis
  misc_feature (1)..(403): tr|A0A443JZX6|A0A443JZX6_9MICO Isochorismate synthase O S=Agrococcus lahaulensis OX=341722 GN=D8Y24_00470 PE=4 SV=1
MPGLRVRTERAELGRLLEHADPRAPLAIRRGADGIVGRGEALRLEFSGPSRLSDAADAWRRVAEDAVVDDAVGVPGTGLVAFGAFAFDDDSAAASVLIVPQVVVGRRGDDEWITWIGDEGRLHPTAVDEVRVELTDGAIDAERYRAVVAEATERIRSGEAEKLVVARDRVGQLPPDGDVRSVAVGLVQRYPDAVTYAVDGLVGASPETLVAAHRGHFFSRVLAGTAARGATPARDAEIAEALASGDKDLREHRFAADSAMAVLRELAPDARASEPFPLRLPNLWHLATDITGTLGEGRSTLDVLALLHPTAAVAGTPRAASLRIIRELEGVDRGRYAGPVGWVDGYGGGEWVIALRGAEIAPDGAIRAFAGAGIVAGSDPAAELAETAVKLRPITDALADPLP

SEQ ID NO: 93242 - protein, 430 aa, Agromyces albus
  misc_feature (1)..(430): tr|A0A4V1QYC6|A0A4V1QYC6_9MICO Isochorismate synthase O S=Agromyces albus OX=205332 GN=ESP51_02460 PE=4 SV=1
MNHTDAPPRHAAPARLVVRTEPVDELAPLIPRADPRHPLLWMRRGEGIVGLGETLRIESSGATRVEDAAAAWTELSALADIDDRVGLPGTGLVAFGAFAFADESEATSVLVVPELVLGRRDGRAWVTRISLATGDDEAADAAASVPLEIPEPTPKRRVPRVTFAPGSVPPAEYEAAVAEAVRRIDAGELEKVVLARQLVGELHEEDGLRATINRLAEDYPDTWVFAVDGLIGASPETLVRVDHGTVSARVLAGTTSRGAGEASDRERAVALAASAKDRAEHALAVASAVKRLAPHTARLDTSPEPFTLQLPNLWHLATDLKGTLGDGSSALDLVRAVHPTAAVAGTPRRVALPVIAELEGFDRGRYAGPVGWIDGDGDGEWAIALRCAQVDGDGTVTAYAGCGIVHDSVPADELAETVMKFRPIVEAFGG

SEQ ID NO: 93243 - protein, 373 aa, Agromyces atrinae
  misc_feature (1)..(373): tr|A0A4Q2M9I6|A0A4Q2M9I6_9MICO Isochorismate synthase O S=Agromyces atrinae OX=592376 GN=ESP50_07085 PE=4 SV=1
MAGIGEVLRLEFSGPNRVSDAASAWRELVGEASIVDQVGVPGTGLIAFGTFAFADDSAETSVLIVPRVVVGHRGNRSWVTLVHAEGEPAASVEVAQRAFGDEFRVRLVPGELPPAAYQDAVAQAVARIDAGELSKVVLARQIRGHVSPDADIRRVLDHLSRGYPDTWTFAVDGLVGSSPETLVRVADGAVSARVLAGTASRGVDAAADRGNAEALTHSEKDAEEHALAVRSAVDALEPHTSTLEASAEPFTVKLPNLWHLATDLEGTVDDGSGALDLVAAIHPTAAVAGTPREAAVRVLAELEGFDRGRYAAPVGWIGADGDGEWAIALRCAHVSPEGEITAWAGCGIVHDSDPAAELAETVMKFRPIVDAFG

SEQ ID NO: 93244 - protein, 293 aa, Agromyces binzhouensis
  misc_feature (1)..(293): tr|A0A4Q2J7F0|A0A4Q2J7F0_9MICO Isochorismate synthase ( Fragment) OS=Agromyces binzhouensis OX=1817495 GN=ESO86 _17770 PE=4 SV=1
PVELPAPAPKRDVPRVRFAPGALPPEAYTDAVAEAVRRIDDGRFEKVVLAREIVGTLHEDAGLRAALAKLADDYPDTWVFAVDGLIGASPETLVRVDHGTVSARVLAGTASRGQDAASDRDQAARLAASHKDLAEHALAVESAVATLAPHTARLDASPEPFTLQLPNLWHLATDLKGTLGDGSSALDLVRAVHPTAAVAGTPRNVALAAITELEGFDRGRYAGPVGWVDADGDGEWAIALRCAQVSTDGTVRAYAGCGIVHDSVPVDELAETDMKFRPIVEAFGAPPPSPPVP

SEQ ID NO: 93245 - protein, 399 aa, Agromyces fucosus
  misc_feature (1)..(399): tr|A0A4Q2JRI3|A0A4Q2JRI3_9MICO Isochorismate synthase O S=Agromyces fucosus OX=41985 GN=ESP57_08725 PE=4 SV=1
MRRGEGIVGLGEVVRIETTGATRVEDAAAAWTSLAALAEIDDRVGLPGTGLVAFGAFAFADESEATSVLIVPELVMGRRDGRSWVTRITLDPADEVTDASGSADDAELEVVLPEPAPKRQVPRVAFTPGSMPPEAYETAVAEAVRRIDAGELEKAGRLEKVVLARQLVGELHEDAGLRATINRLAEDYPDTWVFAVDGLIGASPETLVRVDHGTVSARVLAGTASRGAGEASDRERALTLAASEKDRAEHALAVESAVKRLAPHTARLDTSPEPFTLQLPNLWHLATDLKGTLGDGSSSLDLVRAVHPTAAVAGTPRRIALPAIAELEGFDRGRYAGPVGWIDGGGDGEWAIALRCAQVDSDGTVTAYAGCGIVHDSVPADELAETVMKFRPIVEAFGG

SEQ ID NO: 93246 - protein, 415 aa, Agromyces sp.
  misc_feature (1)..(415): tr|A0A4P6FFX5|A0A4P6FFX5_9MICO Isochorismate synthase O S=Agromyces sp. FW100M-8 OX=2509455 GN=ET445_01860 PE=4 SV=1
MRTVAVDETEPLIPRADPRNPLVWLRRGEGVVGLGEVLRIESSGPTRVEDAAAAWTELAAHADVDDRVGLPGTGLVAFGAFAFADESAATSVLLVPEIVMGRRDGRAWVTRISLATGDDEAQDVSDEASEDPVIPEPAPRRKVPRVTFAPGSVTPDAYEAAVAEAVRRIDAGDLSKVVLARQLVGELHEDDGLRATINRLAEDYPDTWVFAVDGLIGASPETLVRVDHGQVSARVLAGTTARGAGEASDRERAAQLLESPKNREEHALAVASAVSTLEPHTARLDASPEPFTLQLPNLWHLATDLKGTLGDGSTALDLVRAVHPTAAVAGTPRKVALATLAELEGFDRGRYAGPVGWVDGDGDGEWAIALRCAQVDADGTVTAYAGCGIVHDSAPAAELAETVMKFQPIVEAFGG

SEQ ID NO: 93247 - protein, 168 aa, Alcaligenaceae bacterium
  misc_feature (1)..(168): tr|A0A4V1VCZ1|A0A4V1VCZ1_9BURK Isochorismate synthase ( Fragment) OS=Alcaligenaceae bacterium OX=2021368 GN=EON 54_10760 PE=4 SV=1
ALMESDKDLKEHAIVIDAIASVLRPLCRTLNVPTRPSLVATDALWHLSTRIEGELIDPATTSLDLAFALHPTPAVCGYPTELARQAINRLEPFDRGFFAGFVGWMDAAGDGEWAVSLRCATCGPSEATLYAGAGIVPGSVPQRETAETQTKFRTMLSALGLGQSIEQR

SEQ ID NO: 93248 - protein, 401 aa, Alcaligenes aquatilis
  misc_feature (1)..(401): tr|A0A3R9B763|A0A3R9B763_9BURK Isochorismate synthase O S=Alcaligenes aquatilis OX=323284 GN=EGK70_09065 PE=4 S V=1
MNSRIADQVRPATIEEWLRHYRADSSVFASPTVSLMAHGTALERHTHNAQGQLLSDAQTLLSQAAQQGLDAPLLLGVIPFNPAREAYLRVPKEYRRDPVLLRPVQRPPLAKSGNSIASQSLLPNGAGYEDSVSRILATMREQNISKTVMARTVTITLNEALDRQTVLSNMLHSNPAGYTYALPLPGGKAQDPDLFFGASPELLVRRQGDLVTVNPLAGTAPRFADPQRDQASAETLMASSKDLREHAYVIQDVVRILSQFCDCLDVPDGPSLTSTANLWHLSTRISGRLRDPSVTSLELALAMHPTPAVCGLPTQPAMQAIEATEVFDRGYFAGAIGWNDHEGNGEWAVAIRCGHYTRQNLTLSAGAGIVDGSVPALERQETGNKLMTLINSLGLAQNITL

SEQ ID NO: 93249 - protein, 401 aa, Alcaligenes faecalis
  misc_feature (1)..(401): tr|A0A411T0Y5|A0A411T0Y5_ALCFA Isochorismate synthase O S=Alcaligenes faecalis OX=511 GN=EYC51_09870 PE=4 SV=1
MNSRIADHVRPATIEEWLQHYQADSSVFASPTVSLMAHGTALERHTHNAQGQLLSDAQGLLSEAAQQGLHAPLLLGVIPFNPARNAYMRVPTTYQRDPVLRRPVQRPPLARSRNTIASQQLLPDGQGYEDSVSHILATMREQNISKTVMARTVTITLNEALDRQTVLSNMLHSNPAGYTYALPLPGGAAHDPDLFFGASPELLVRRQGDLVTVNPLAGTAPRFADPQRDQASAQTLMASSKDRREHAYVIQDVVRILSRFCDTLDVPEGPSLTSTANLWHLSTRISGRLRDPGVSSLELALAMHPTPAVCGLPTQPAMQAIEATEVFDRGYFAGAIGWNDHEGNGEWAVAIRCGHYTQQGLTLSAGAGIVEGSVPALERQETGNKLMTLINSLGLAQNIAL

SEQ ID NO: 93250 - protein, 373 aa, Algibacter lectus
  misc_feature (1)..(373): tr|A0A090X2C4|A0A090X2C4_9FLAO Isochorismate synthase O S=Algibacter lectus OX=221126 GN=JCM19274_4023 PE=4 SV= 1
MTFNEFLERIDTQYNAQLPFVIYRKPNESAVNGLLQETNDLVYTEDFTEKGFVFSPFDNTEKSVLMPLELSDKLKSLVPESTAIDSIESSSKVDNTLQKEVHIKLVERGVEAIKNNQFKKVVLSRTESVSLSENNPIAIFNNLLQNYASAFVYCWYHPKVGLWLGATPETLVKIEGQRFSIMALAGTQNYKGSLDVTWQAKELQEQQYVTDFILDSIATTIDNINVSKIETVKAGNLLHLKTRIWGVLKPNAISLKDLLYSLHPTPAVCGLPKEAAKQFILEEEHYNRGFYTGFLGELNLEITSAPRSGKRNIENRAYATTKKSTQLYVNLRCMQLKENKAIVYVGGGITESSNPENEWEETVSKSLVIKKVL

SEQ ID NO: 93251 - protein, 405 aa, Algoriphagus sp.
  misc_feature (1)..(405): tr|A0A418PR63|A0A418PR63_9BACT Isochorismate synthase O S=Algoriphagus sp. N3 OX=2056311 GN=D0X99_11640 PE=4 SV =1
MNATENPITTTQSEVLDLLFLKGLTSGGSFAVWRKPRTTKLEFLLDDKKNPERVTLNFEELPAGFLVHPFADQEDKKAFFIRSSHYFSFDLDQDLDQEDLPKWLNQSLDPEAGSIRSEISHLIQIKSESSLQENLKGNEKEHFIRLVEHGIKAIEDGILEKVVPARTKFIHLSEDFDLGKTFSNLLKSYPNSFINFFHIPQVGTWIGASPEVLIETKGDHFHTMALAGTQPAIGENPLKSAGWTQKEIEEQALVCRYIVDCFKKIRLREYEEHGPKTIMAGNLLHLRTDFRVNMKATGFPQLGSVMLELLHPTSAVCGMPRKEAHDFLQENEGFDRSFYAGFLGPVNIQDETSIYVNLRTASIRGDKAILYAGAGVTEESDPEKEWEETELKCQIIGKFIQKPNT

SEQ ID NO: 93252 - protein, 434 aa, Aliikangiella sp.
  misc_feature (1)..(434): tr|A0A545UCB2|A0A545UCB2_9GAMM Isochorismate synthase O S=Aliikangiella sp. M105 OX=2592383 GN=FLL46_15005 PE=4 SV=1
MLSYDGESLDSSENSNILEEFREGESFFFRSEEFAFLTSGTLVKVPDTNLTCQSFEQTVMRTFEQAKHLMSNKTASIEPPLVVGAIPFDRTKPVNLRIPKSVKRFDPQTRLSVDAVEATHSLSSVKEVVSNWTTTHMRSVPNGDAYKQSVSQALDLFAKTELDKVVLARTLEIGCDQELPVSKLIARLAQSNPNGFIFAADSSLNQLSPRTLFGASPELLISKKGAKVFSNPLAGSAARSTSVTEDCNRAEALLRSTKDLHEHALVIESIVDTLSPYCKKLHLPGKPSLLKTPTMWHLSTLIQGELKDSETSSLSLAKALHPTPAVCGNPTVMARETISRLEHIERGFFTGTVGWSDINGDGEWSVTIRCAEKQAQLLKLYAGAGIVEGSLPDLELAETAAKFGTMLNALGISYSDAINYSDMGMSTSTKTKVA

SEQ ID NO: 93253 - protein, 440 aa, Aliivibrio finisterrensis
  misc_feature (1)..(440): tr|A0A4V1Z8U7|A0A4V1Z8U7_9GAMM Isochorismate synthase M enF OS=Aliivibrio finisterrensis OX=511998 GN=menF PE=3 SV=1
MSTFQNAIESIRHQITQATSRHTICLELDWSIGDQLIDWLEAQPVFPKFYWQSRDGQEEVAVIGQVKTFTDPSAAQKVLAPKQRIWGGRSFDGRTERNRRCMSSFFFLPQVEISRLVSSWQIMVNLSDDNSRLLSTLDKLVEHFSSLSELHCRVTQRINTPEKSDWTNMVNKALTAISNQQFEKVVLARKTTLTLDQTLSSAQFLKASRKANSHSFHFMMALDSEHCFIGSTPERLYVRNGYALKTEALAGTIGRGHDEEEDNQLASWLIADKKNQYENRLVVDDIINRLSKFSLSMTVAESSELVKLRKVQHLKRPISAEINAECCDSQLLDNLQPTAAIAGLPRMSALDFIIDNEPFARGWYSGAVGFLSQQRSEFCVAIRSALVMGNKLHLFAGAGIVPGSEPSSEWEELDKKTSTLCTLLESDPAVSAEIKESQVA

SEQ ID NO: 93254 - protein, 440 aa, Aliivibrio fischeri
  misc_feature (1)..(440): tr|Q5E479|Q5E479_ALIF1 Isochorismate synthase MenF OS=A liivibrio fischeri (strain ATCC 700601 / ES114) OX=3123 09 GN=menF PE=3 SV=1
MSTFQDAIESIRHQITQATTSHTISLKLDWSIGEQLIDWLEAQPVFPKFYWQSRDGEEEVAVLGQVKTFTDPSAAQKVLAPQQRIWGGRSFDGRTERNRRCMSSFFFLPQVEITRLGSSWNIMVNVSEDNSRLLSTLNKMTEEFDDLSELHCRVTQRINTPEKADWSNMVNKALTAIENKQFEKVVLARKTTLTLDLNLSSAQFLKASRQSNSHSFHFMMALDSEHCFIGSTPERLYVRNGYALKTEALAGTIGRGHDEEEDNQLASWLISDKKNQYENRLVVDDIVHRLSKFSISMNVADTSELVKLRKVQHLKRPISAEINAECSDSQLLDNLQPTAAIAGLPRMSALDFIIDNEPFARGWYSGAVGFLSQQRSEFCVAIRSALVMGNKLHLFAGAGIVPGSEPSSEWDELDRKTSTLCTLLESDTNVSSDITESQVA

SEQ ID NO: 93255 - protein, 440 aa, Aliivibrio logei
  misc_feature (1)..(440): tr|A0A1B9NU64|A0A1B9NU64_ALILO Isochorismate synthase M enF OS=Aliivibrio logei OX=688 GN=menF PE=3 SV=1
MSTFQDAIESIRHQIAQATSSHTICIDLDWAVGDQLIDWLEAQPIYPKFYWQSRDGEEEVAVLGQVKTFTDPKAAQQILAPQQRVWGGRSFDGRTERNRRCMSSFFFLPKVEITRLKSSWHFMVNLSDDNSRLLSTLDKLSEQFTSLSELHCRVQQRINTPEKEDWSNMVNKALTAISNKKFEKVVLARKTTLTLDQPLSSAQFLKASRKANSHSFHFMMALDSEHCFIGSTPERLYVRNGYALKTEALAGTIGRGHDEEEDDQLASWLISDKKNQYENRLVVDDIVNRLSKFSLSMKVAEKSELVKLRKVQHLKRPISAEINQECSDSQLLDNLQPTAAIAGLPRMSALDFIIDNEPFARGWYSGAVGFLSQQRSEFCVAIRSALVMGNKLHLFAGAGIVPGSEPSSEWDELDRKTSTLCTLLESDITMNPEITESQVA

SEQ ID NO: 93256 - protein, 440 aa, Aliivibrio salmonicida
  misc_feature (1)..(440): tr|B6EJ55|B6EJ55_ALISL Isochorismate synthase MenF OS=A liivibrio salmonicida (strain LFI1238) OX=316275 GN=men F PE=3 SV=1
MSTFQDAIESIRHQIAQATSSHTICIDLDWTVGDQLIDWLEAQPIYPKFYWQSRDGEEEVAVLGQVKTFTDPKAAQQILAPQQRVWGGRSFDGRTERNRRCMSSFFFLPKVEITRLKSSWHFMVNLSDDNSRLLSTLDKLSEQFTPLSELHCRVQQRINTPEKEDWSNMVNKALTAISNKQFEKVVLARKTTLTLDQPLSSAQFLKASRKANSHSFHFMMALDSEHCFIGSTPERLYVRNGYALKTEALAGTIGRGHDEEEDDQLASWLISDKKNQYENRLVVDDIVNRLSKFSLSMKVAEKSELVKLRKVQHLKRPISAEINQECSDSQLLDNLQPTAAIAGLPRMPALDFIIDNEPFARGWYSGAVGFLSQQRSEFCVAIRSALVMGNKLHLFAGAGIVPGSEPSSEWDELDRKTSTLCTLLESDITMNPEITESQVA

SEQ ID NO: 93257 - protein, 440 aa, Aliivibrio sifiae
  misc_feature (1)..(440): tr|A0A2S7XH52|A0A2S7XH52_9GAMM Isochorismate synthase M enF OS=Aliivibrio sifiae OX=566293 GN=menF PE=3 SV=1
MSTFQNAIESIRHQIAQATSSHTICLELDWSVGDQLIDWLEAQPIYPKFYWQSRDGQEEVAVLGQVKTFTDPSAAQKVLAPQQRIWGGRSFDGRTERNRRCMSSFFFLPQVEISRLASSWQFMVNLSEDNSRLLSTLNKLVENFTSLSELHCRVTQRINTPEKADWTNMVNKALTAISNQQFEKVVLARKTTLTLDQNLSSAQFLKASRKANSHSFHFMMALDSEHCFIGSTPERLYVRNGYALKTEALAGTIGRGHDEEEDNQLASWLISDKKNQYENRLVVDDIVNRLSKFSLSMNVAETSELVKLRKVQHLKRPISAEINSDCSDSQLLDNLQPTAAIAGLPRMSALDFIIDNEPFARGWYSGAVGFLSQQRSEFCVAIRSALVMGNKLHLFAGAGIVPGSEPSSEWEELDRKTSTLCTLLESDISMNSDITESQVA

SEQ ID NO: 93258 - protein, 440 aa, Aliivibrio sp.
  misc_feature (1)..(440): tr|A0A1B9PRI8|A0A1B9PRI8_9GAMM Isochorismate synthase M enF OS=Aliivibrio sp. 1S175 OX=1840087 GN=menF PE=3 SV= 1
MSTFQDAIESIRHQIAQAVSSQTICIHLDWSVGDQLIDWLEAQPIYPKFYWQSRDGEEEVAVLGQVKTFSDPKVAQQILAPQQRVWGGRSFDGRTERNRRCMQSFFFLPQVEISRLASSWQIMVNLSEDNSRLLLTLNKLVENFASLSELHCRVTQRINTPEKGDWTNMVNKALTAISNKQFEKVVLARKTTLTLDQNLSSAQFLKASRKANSHSFHFMMALDSEHCFIGSTPERLYERNGYALKTEALAGTIGRGHDEEEDNQLASWLISDKKNQYENRLVVDDIVNRLSKFSLSMNVAETSELVKLRKVQHLKRPISAEINNDCSDSQLLDNLQPTAAIAGLPRMSALDFIIDNEPFARGWYSGAVGFLSQQRSEFCVAIRSALVMGNKLHLFAGAGIVPGSEPSCEWEELDRKTSTLCSLLESDISINSDITESQVA

SEQ ID NO: 93259 - protein, 440 aa, Aliivibrio wodanis
  misc_feature (1)..(440): tr|A0A090IMZ4|A0A090IMZ4_9GAMM Isochorismate synthase M enF OS=Aliivibrio wodanis OX=80852 GN=menF PE=3 SV=1
MSTFQNAIESIRHQITQATSSHSICLELDWSIGDQLIDWLEAQPVYPKFYWQSRDGQEEVAVVGQVKTFTDPSAAQKVLAPQQRIWGGRSFDGRTERNRRCMSSFFFLPQVEISRLASSWQIMVNLSDDNSRLLSTLDKLVEHFSSLSELHCRVTQRINTPEKADWTNMVNKALTAISNKQFEKVVLARKTTLTLDQDLSSAQFLKASRKANSHSFHFMMALDSEHCFIGSTPERLYVRNGYALKTEALAGTIGRGHDEEEDNQLASWLISDKKNQYENRLVVDDIINRLSKFSLSMKVAETSELVKLRKVQHLKRPISAEINSDCCDSQLLDNLQPTAAIAGLPRMSALDFIIDNEPFARGWYSGAVGFLSQQRSEFCVAIRSALVMGNKLHLFAGAGIVPGSEPSSEWEELDKKTSTLCTLLESDPTVSVEVKESQVA

SEQ ID NO: 93260 - protein, 467 aa, Alkalibacillus haloalkaliphilus
  misc_feature (1)..(467): tr|A0A511W7G7|A0A511W7G7_9BACI Isochorismate synthase M enF OS=Alkalibacillus haloalkaliphilus OX=94136 GN=menF PE=3 SV=1
MLTIERLSINEKLNEALSHIDEQGRFLSLTIDVHSINSIDYFASRTDLKGERFYWSSANGEITFVGLGYANQFYSTDSAERYQTIEQALEDQKQQMVHLQDEQITGTGAVYFGGFSFFNERHHSEWHDFPVNQFVLPKRLLTVKNDEQYLSLNLWIEPSDSLDDVSTMIQAELDQINAVQPIEKNTMNFTQINDELTYDQWESLINNAVEEITDGKLDKVVLAREVEALFEEQIPVEQVLNALLEQQERSYIFVMENNNQAFIGATPERLVEVNRGELQSACLAGTTSRGQTVDEDEWKALELLKDDKNLEEHQYVVKMIKDSVSPLCDTLSIPSQPMIRKLSKIQHLFTPVSGSLKESVTIFDALKALHPTPALGGEPRQEAMNFIQRNEPLERGWYAAPIGWIDEELNGEFAVAIRSALLTGHKARLFAGCGIVSDSDPKAEYDETNLKFSPMLGALGGYIDDHE

SEQ ID NO: 93261 - protein, 388 aa, Alloactinosynnema sp.
  misc_feature (1)..(388): tr|A0A0H5D942|A0A0H5D942_9PSEU Isochorismate synthase o f siderophore biosynthesis OS=Alloactinosynnema sp. L-0 7 OX=1653480 PE=4 SV=1
MRAAGHDGGVAGDDAGPRTLVERYRPGDFLLAGPASTLLATGCQAVVTESHAEELAARVGKLILDSGVPVAVGVLPFDDTLDPRLVIPAEVLSAGPAHGLVPAAVPHTVAASVTPVPEPAAYARAVAATVADLRTDPDLRKVVLARAVDLGFADPVDIAALLPGLIEANPLGYTYAADLDAGRTLLGASPELLLRRTGTTVLSNPLAGSVPRVADPAADRAVGEALLASAKDQGEHRVVVEAVVETLRPFCRNLTVPPTPSLVETPSVWHLSTRITGELIDPDVSALRLAAALHPTPAVCGTPAAAARAAIAHHEPFDRGFYSGVVGWCDAAGDGEWIVAIRCAEVDDRRMRLFAGAGIMPDSVPESELAETTAKFHTLLAALGMRLN

SEQ ID NO: 93262 - protein, 471 aa, Allobacillus sp.
  misc_feature (1)..(471): tr|A0A556PBR8|A0A556PBR8_9BACI Isochorismate synthase M enF OS=Allobacillus sp. SKP4-8 OX=1955272 GN=menF PE=3 SV=1
MRTSGGICMIQTEKISVHDQLHQATANLINQTQIEVSLVEPINEISALEFFKKTQLLGDRIFWKNPTGDMQIAGVGAHKRLKPKNGEDRFQSIREQWEAYLETCSLPDESVTGTGPILFGGFSFMDHIDQTDDTWEAFASGEMILAKWMLTEQDGQTYLTHHATIDETTNVNEIANRFTEMKKVLSKPIMEEALPKMQSMNDQFTYEHWETLLNEAIDTIREQALEKVVLARKTDVLFDHKIPLAEVIERMIDKQTNSYVFVIEQENDAFIGATPERLVQVKGNELLSACLAGTTARGKTEDDDEMLAWQLLNDKKNREEHDYVVQMIKQSVAPYVESFDIPDTPVIYPLKSLQHLFTPVTATLKNDATILELVKQLHPTPALGGEPRDKALQFIDEKEPFDRGWYAGPIGWLDANFDGEFAVAIRSGLITENQATLFAGCGVVKDSDPQAEYEETRIKFIPMLDALGGTQ

SEQ ID NO: 93263 - protein, 346 aa, Alloprevotella sp.
  misc_feature (1)..(346): tr|A0A496KWF6|A0A496KWF6_9BACT Isochorismate synthase O S=Alloprevotella sp. OX=1872471 GN=D8H91_01165 PE=4 SV= 1
MLASVRYRLPGETLVHEIGTKHPPKRCTSLAEIPPQKGYLFAPFQENDAHPLWFFPADEQRTWTQPTEVPSFSLAYEVEEDHRTEYMRAFEACQAAFQQSELQKVVLSRTLSVHFDQNLTKDDYYRLFEQACIAYPNSFVSLISLPAPWGTWLMATPEILISAKDNLWHTMALAGTMEKTADSSLSLEVWSEKNRKEQQWVVDYISRQLEKLGCEYQKSPTYVRPAAHLLHLCTDFSVIPPKEKSIACVIEALHPTPAVCGWETSTAQALISKVESHDRSYYSGYSGPIDPNSAHLFVTLRCMNLNNDTATLYAGGGLLPESNENSEWQETERKLNTMLRLFSAHK

SEQ ID NO: 93264 - protein, 409 aa, Altererythrobacter sp.
  misc_feature (1)..(409): tr|A0A420EA86|A0A420EA86_9SPHN Isochorismate synthase O S=Altererythrobacter sp. HN-Y73 OX=2320269 GN=D6851_163 20 PE=4 SV=1
MVIYLYPEGVYVFALYQKERCVETTGIKRKLAIPAVWETEHAVAAHFAAGKDGEETVDASESRIADPAPHSLLVGALPFDRQAAPLLIEPETASWRHGVEALALSAQAPARLPARPVRLTGEPDGPAYARIVAEALRRLDRREGAVLRKVVLARSLHIVMDRPVDPLAIAARLMRDNSVTTFLMDLEEATGLPGHKMVGATPELLVARKGSQVLSHPLAGSAPRSSDPAADRAAADGLLHSEKDQREHSLVVEAIADMLAPYCSALTMPEGTTLRSTASMWHLGTRIEGRLKNGAMPSAAGLAALLHPTPAVGGMPRQAALDCIRELEPQDRGFYAGAVGWTDRAGDGEWYVSLRCAELRDKQLTLHAGAGIVAGSDPQSEVAETWAKFRAILQGLGIEADDSLMEFAA

SEQ ID NO: 93265 - protein, 443 aa, Alteromonadaceae bacterium
  misc_feature (1)..(443): tr|A0A420E705|A0A420E705_9ALTE Isochorismate synthase M enF OS=Alteromonadaceae bacterium ALS 81 OX=2164068 GN= menF PE=3 SV=1
MISIDSTAFEKALEGLAATNLAGYQQLKFSCLKVDPLAWLNQQLHTVRGYWSEPSGAHTAFVGQACDLLSPEQLQNACESLNHNDDSLRFYGGMAFSRRSAQWPGFPQRRFVLPRFELRQNAQLSEFVINADFHNNPRQEIELIRSQFYALQDPHPLPPLSCQLRQYSYQPNFERWQKLVDEVTAPSFQAHTAKVVLARQTQIKLDRELNPFTLIDHWQKREQQCYSFVFQFDGVHSFVGCSPERLYSRDGLDLRTEALAGTAPRHIDPAQDIELANRLLEDDKNQRENQIVVDDLVRRLQEISLHVQPQAHTELLRLRRVQHLKRPIHATISPDLDDSALLSTLHPTPAVGGLPRSSAMRFIEQKEGFDRGWYSGAVGWFSGERSEFSVAIRSALLSPTSLNTYAGAGIVEGSQAQEEWDELNHKTAALLDLLQLDLDSLSA

SEQ ID NO: 93266 - protein, 405 aa, Amnibacterium sp.
  misc_feature (1)..(405): tr|A0A3A1U6H2|A0A3A1U6H2_9MICO Isochorismate synthase O S=Amnibacterium sp. DD4a OX=2306585 GN=D1781_00020 PE=4 SV=1
MLQPGDAPFPVTIRRIASAAEELAAAGAQHGPPVAVWRRDDDVLTGFGTAARLVFAGPGRVLDAAAAWRRFVARAVVDSDAPDASPVAFGAFAFADRSAAQSVLLVPRVVVVQRGGAAHRIDLDEVGPVVPPTTVPPVAPFPPEAYERAVDEAVRRIRQGAFEKVVLARHVVLDTPDLDLDAALRLLEDRYRGAWVFAVDGVFGASPETLATVRGGAATSRVLAGTAPRDQDPTADDANRAALLESPKNRFEHALAVDSLLLTLGPATDDLDIGRPFALGLRNVWHLATDATARVRAGVGALDLVALLHPTAAVAGAPREAALAAIEALEPFDRRRYAGPVGWIDGRGDGEWAIALRSAEVEGPDRVRAFAGAGVVAGSDPHQELEETGWKLQPIREAVAPVRAG

SEQ ID NO: 93267 - protein, 371 aa, Amycolatopsis acidiphila
  misc_feature (1)..(371): tr|A0A558AJV8|A0A558AJV8_9PSEU Isochorismate synthase O S=Amycolatopsis acidiphila OX=715473 GN=FNH06_06095 PE= 4 SV=1
MDTGELLEDYTPGDFYFGTSRRTILGSGSLRTFTDTDVAALSEVVPAALAGSPTSLAVGVLPFDTAGTPGHIVLPETVRVAGPARPASRKTIGAASAVRAVPEPVRHVEAVGRAIKILRDGGLRKVVLARALDLEFDFEVSAQAILHNLAKDKAGAYTYAAGLPSGRTLLGATPELLLSRVGGQVISHPHAGSAPRSGDPVTDRENADALAGSRKDHIEHAVLTEAIVETLRPFCRSLDVPREPSLVSTPTMWHLGTVVTGELVDRDVTALHLAAALHPTPAICGSPTEAARQLVSELEPFDRGYYAGAVGWMDTEGDGEWAVSIRCAEVAERSLRLYAGGGIVPASDPKAELDETSAKFQTLLRAMGMEL

SEQ ID NO: 93268 - protein, 398 aa, Amycolatopsis alba
  misc_feature (1)..(398): tr|A0A229S587|A0A229S587_9PSEU Isochorismate synthase O S=Amycolatopsis alba DSM 44262 OX=1125972 GN=CFP75_0545 5 PE=4 SV=1
MSSPAPARPRPVHQAADLLAAYLPGSFYYSSARGSLLADGVYSPVHAAPGRRARAAAEVLDAALVAGVTEPVVAGAIGFRPDAPSSLVVPAVVRRAGPPGAGGPVAPLGGGNWAVSPRPAPEVYTTAVAKALDEIRDGDLRKIVLARCLDVTGGDPIAVPRLLARLVHADPAAHAFAVDVSAPGDPAPRTLIGASPELLVSRRGRVVTANPLAGSRPRVADDAENVRWIDDLLASEKDRDEHAHVAAQVAEVLGRFCVDLDVPAEPEVIGTPTMWHLSTRISGRLADAGDAGSSALGLAEALHPTPAVCGVPTGLARDTIAALEPEDRGYYAGLVGWTDQDGDGEWVVTIRCAEVLDRTVRLFAGAGVVAGSDPAAELTETGAKFGTMLRALGLEGAA

SEQ ID NO: 93269 - protein, 369 aa, Amycolatopsis bartoniae
  misc_feature (1)..(369): tr|A0A557YLX3|A0A557YLX3_9PSEU Isochorismate synthase O S=Amycolatopsis bartoniae OX=941986 GN=FNH07_31060 PE=4 SV=1
MDANQLLADYTPGDFYFGTSRRTILGTGARRTFTETDVASLSEAVPAALAPGSLAVGVLPFDTAGTPGHLVLPENVQVAGPAAPARHKDIGAPVAVRAVPEPVRHAEAVASAIKILKDGGLRKVVLARALDLDFEDEVPVQAILHNLAKDKAGAYTFAAGLPGGRTLVGATPELLLSRVGNQVVSHPHAGSAPRSADPVTDRENAEALASSRKDHLEHAVLTEAIVETLRPFCRSLDVPREPSLVSTPTMWHLGTVVTGELADRDITALHLAAALHPTPAICGTPTEAARRLVSELEPFDRGYYAGAVGWMDSAGDGEWAVSIRCAEVAESSLRLYAGGGIVPASDPKAELDETSAKFQTLLRAMGLEL

SEQ ID NO: 93270 - protein, 397 aa, Amycolatopsis japonica
  misc_feature (1)..(397): tr|A0A075USK4|A0A075USK4_9PSEU Isochorismate synthase D hbC OS=Amycolatopsis japonica OX=208439 GN=dhbC PE=4 SV =1
MSSPAPARPRPVHQAADLLAAYLPGSFYYSSARGSLLADGVYAPVHAAPGRRARAAAEVLDAALVAGVTEPVVAGAIGFRPDAPSSLVVPALVRKAGPPKASGPVAPLGGSWTVSPRPAPEVYTTAVAKALDEIRDGDLRKIVLARCLDVTGGDPVAVPRLLARLVHADPAAHAFAVDVSAPGDPAPRTLIGASPELLVSRRGRVVTANPLAGSRPRVADDVENARRVDDLLASEKDRAEHAHVAAQVAEVLGRFCVDLDVPAEPEVIGTPTMWHLSTKISGRLADVTDAGSSALGLAEALHPTPAVCGVPTGLARDTIAALEPEDRGYYAGLVGWTDQDGDGEWVVTIRCAEVRDRTVRLFAGAGVVAGSDPAAELAETGAKFGTMLRALGLEGVE

SEQ ID NO: 93271 - protein, 398 aa, Amycolatopsis lurida
  misc_feature (1)..(398): tr|A0A2P2FZM6|A0A2P2FZM6_9PSEU Isochorismate synthase O S=Amycolatopsis lurida NRRL 2430 OX=1460371 GN=BB31_042 70 PE=4 SV=1
MSSPAPARPRPVHQAADLLAAYLPGSFYYSSARGSLLADGVYSPVHAVPGKRARAAAEVLDAALVAGVTEPVVAGAIGFRPDAPSSLVVPAVVRRAGPPKASGPVAPLGGATWSVSPRPAPEVYTTAVAKALDEIRDGDLRKIVLARCLDVTGGDPIAVPRLLARLVHADPAAHAFAVDVSAPGDPAPRTLVGASPELLVSRRGRVVTANPLAGSRPRVADEAENARRIDDLLASEKDRAEHAHVAAQVAEVLGRFCDDLDVPAEPEVIGTPTMWHLSTRISGRLADPGDAGSSALGLAEALHPTPAVCGVPTALARDTIAALEPEDRGYYAGLVGWTDQDGDGEWVVTIRCAEVRDRTVRLFAGAGVVAGSDPAAELAETGAKFGTMLRALGLEGVA

SEQ ID NO: 93272 - protein, 388 aa, Amycolatopsis panacis
  misc_feature (1)..(388): tr|A0A419I6M2|A0A419I6M2_9PSEU Isochorismate synthase O S=Amycolatopsis panacis OX=2340917 GN=D5S19_10575 PE=4 SV=1
MPTRTAPASPVETTLRYRRGDFLFATARRALLAQGAAAILADLDPRRLARTVAAELDRSGVPLAVGALPFDTGPDTTVPGRLVLPRTVHRAQAEAETPVLPPVEELPAPVATRRLPSAEGHRANVRAAVAALGERGLRKAVLARALDLEFDAPIPVERIVRNLACGNPRHHTYAAELPGGATLVGATPELLLSRAGDSVFTTPHAGSMPRAADPAADRASGERLRSSAKDQEEHAVVVEYVVEALRPFCRKLDVPGEPELVSTPAIWHLRTAITGELVDRSVTALDLAAALHPTPATCGTPTAGARALEKELEPFDRGYYAGTVGWVDAAGDGEWAVAVRCAQVTQQSLRLYAGGGIVAASDPEVEYQETVAKFGTLLAAMGLDDRSA

SEQ ID NO: 93273 - protein, 373 aa, Amycolatopsis rhizosphaerae
  misc_feature (1)..(373): tr|A0A558CY20|A0A558CY20_9PSEU Isochorismate synthase O S=Amycolatopsis rhizosphaerae OX=2053003 GN=FNH05_11575 PE=4 SV=1
MDARELLEQYTPGDFFFGTADRTILGTGSVHSFTDTDAFALSDAVPAALAESGSSLAVGVLPFDTAATAGHVVVPRVTRIAGPVQVADRKPVGAPVAVRAVPEPVRHVEAVARAVAALQARGMRKVVLARALDLEFTEDVPAEAILNNLVKDKAGGYTFAASLPHGRQLIGATPELLLSRTGDQVICHPHAGSAARSADPVTDRENGESLARSRKDHIEHGVLIDALVETLRPFCSSLDVPREPALVSTPTMWHLATRVTGRLADRDVTALHLAAALHPTPAICGSPTEAARTLVGELEPFDRGYYAGAVGWMDAAGDGEWAVSIRCAEVSERSLRLYAGGGIVPASDPKAELDETSAKFQTLLRAMGLDLDL

SEQ ID NO: 93274 - protein, 397 aa, Amycolatopsis sp.
  misc_feature (1)..(397): tr|A0A429CRC7|A0A429CRC7_9PSEU Isochorismate synthase O S=Amycolatopsis sp. WAC 01416 OX=2203196 GN=DL990_29785 PE=4 SV=1
MSSPAPARPRPVHQAADLLAAYLPGSFYYSSARGSLLADGVYSPVHAAPGKRARAAAEILDAALVAGVDEPVVVGAIGFRPDAPSSLVVPAVVRRAGPPKKSGPVAPLGGNWSVSPRPAPEVYTTAVARALDEIRDGDLRKIVLARCLDVTGGDPVAVPRLLARLVHADPAAHAFAVDVSAPGDPAPRTLIGASPELLVSRRGRIVTANPLAGSRPRVADDAENARRIDDLLASEKDRAEHAHVAAQVAEVLGRFCVDLDVPTEPEVIGTPTMWHLSTRISGRLADPGDAGSSALGLAEALHPTPAVCGVPTALARDTIAALEPEDRGYYAGLVGWTDQDGDGEWVVTIRCAEVRDRTVRLFAGAGVVAGSDPEAELAETGAKFGTMLRALGLEGVA

SEQ ID NO: 93275 - protein, 398 aa, Amycolatopsis thailandensis
  misc_feature (1)..(398): tr|A0A229RSY0|A0A229RSY0_9PSEU Isochorismate synthase O S=Amycolatopsis thailandensis OX=589330 GN=CFP71_29815 PE=4 SV=1
MSSPAPARPRPVHQAADLLAAYLPGSFYYSSARGSLLADGVYSPVHAAPGERARAAAEVLDAALVAGVPEPVVAGAIGFRPDAPSSLVVPAVVRRAGPPRAGGPVAPLGGGTWSVSPRPAPEVYTTAVAKALDEIRDGDLRKIVLARCLDVTGGDPVAVPRLLARLVHADPAAHAFAVDVSAPGDPAPRTLIGASPELLVSRRGRIVLANPLAGSRPRVADDAENARRISDLLASEKDRHEHAHVAAQVAEVLGRFCLDLDVPAEPEVIGTPTMWHLSTRISGRLADAGDAGSSALGLAEALHPTPAVCGVPTGLARDTIAALEPEDRGYYAGLVGWTDQDGDGEWVVTIRCAEVRDRTVRLFAGAGVVAGSDPAAELAETGAKFGTMLRALGLEGVA

SEQ ID NO: 93276 - protein, 469 aa, Anabaena cylindrica
  misc_feature (1)..(469): tr|K9ZN84|K9ZN84_ANACC Isochorismate synthase OS=Anabae na cylindrica (strain ATCC 27899 / PCC 7122) OX=272123 GN=Anacy_4416 PE=4 SV=1
MTISPCRSRFFVDYKDLHQLLLAVQEKCCENHTQQIVSISLEIDLIDPLIVLDKFAQANTLNFYFENKSKGEAITAIDSITKLKISGADRFNQAEDFIKNCRKNIISFGNIFQGFAGSHFFCSFSFFDQHNQVNYPFPSATIFLPKLQVAVKNESCVLVMNSVINADINIQTILQELKTKIQSLQSLTKPNIEIIPAKFIKENIINSDNFKYSVLSALEKIKSNHLIKIVLADALDVKSYRPFNLFKSLNNLRQLHPNCYVFSTSNGKGQNFIGASPERLISIQNQQLITDALAGSAPRGKTPREDAENANRLINSTKEKHEHKLVLDFITQRLSQLGLFPQILSPRLRQLSNIQHLWTPISAVVPANVHPLKIVGQLHPTPAVAGAARDVACAEIRNYESFERGLYAAPLGWVDSSGNCEFIVGIRSALIDGDRARLYAGAGIVAGSDPDKEFAEVQLKLQALLKALV

SEQ ID NO: 93277 - protein, 471 aa, Anabaena sp.
  misc_feature (1)..(471): tr|K7W755|K7W755_9NOST Isochorismate synthase OS=Anabae na sp. 90 OX=46234 GN=menF PE=4 SV=1
MTISPCRSHTFVDYKYLNQLLLEIQENCRRHNYSKIVSIPLEIGLVDPLLVFDQFNQKNTINFYFENKSNGEAIAAIDTLDKIEISGKDRFTKSEEFIKNCLKNIIPISHENQTFSLPRFFCTFSFFDQHKKVDCPFPSATVFLPCWQIALKNNRCTLVMNTIINSRIKISRILDNLQRHLEIIRSLHTHSLNIDKFPLNLYKKITNNGEKFKTSVSSVLEIIHANQLRKIVLADILDVSANHDFNLLQSLNNLRQIHPNCNVFSTSNGQGQNFIGASPERLISIHKRQLITDALAGSAPRGKTPTEDATNANNLVNSTKEKHEHKLVLDFITQHLSQLGLFPQVLAPRLRQLSNIQHLWTPISAVVPNNIHPLQIVAKLHPTPAVAGAARDIACAEIRRYESFERGLYAAPLGWVDGEGNCEFIVGIRSALIDGNYARLYAGAGIVAGSDPQKEFAEVQLKLQALLKALV

SEQ ID NO: 93278 - protein, 456 aa, Anaerobacillus macyae
  misc_feature (1)..(456): tr|A0A0J6CXA7|A0A0J6CXA7_9BACI Isochorismate synthase M enF OS=Anaerobacillus macyae OX=157733 GN=menF PE=3 SV= 1
MLHQGIRKAEKRGTSVLVSQVLSVAAVDPFSFYAAGPNKYDNDRTFWSDPENDTTIVGLGCVKQFQAYKDRFRTIENEWQSFLQFSIVDGAPSRPGVGPVLLGGFAFDPTAPESGDWDHFPEGGMVLPELMLTSAGSQGWLTINAIVNEDDDLEAVAEDLLLKHHGILAHSSTDISSKVDAISIEEIRPQEWKETVRSAAANIRTGKLEKVVLAREIRVQSSRSFSSSRTLMNLKKQQSDSYLFAFEYGKQCFLGASPERLVKREGQQVYSTCLAGSIQRGETPETDIELGYILLNDHKNRIEHDLVVQMIRRAMEEECDFVQVPSEPELLKTPHIQHLFTPVVARAGVGTSLLRMVERLHPTPALGGYPQEEAVEEIKRIENLDRGWYAGPVGWIDYQGNGEFAVAIRSGLLNGDQATLYAGCGIVADSDPESEYEETKMKFKPMLTALGGNQYD

SEQ ID NO: 93279 - protein, 840 aa, Anaerobiospirillum thomasii
  misc_feature (1)..(840): tr|A0A2X0V6R5|A0A2X0V6R5_9GAMM Isochorismate synthase e ntC OS=Anaerobiospirillum thomasii OX=179995 GN=entC PE =4 SV=1
MSEVPMQSMQDHMGIEFLELSSNKAMARMKVSTATIQPFGFVNGGALLAMAEILSGAASTYILPDDKVALGSSVHANHINTAPLDSIILAVATLVHQGSIHHIWDVKIYNSDKRIISTLQITNTIVSKAALQKKFAKTNAAAARYIENFDKNKLLTSSQPTAAEAQSFDDTTVADDMPFTLSDNSNPFDMSNSPVREAQTAETVTHAQSTDTAKDESDYSLKDENELAPDAEDLKDANVAIPETLVKYQSSIDRYKADVIFNSLLNHSTHKSYYDNIAMSTIKMLVHNSRVPESTLELMPSSAKFSPFNIQHPIKEFNLVDQDPEFKKRFKRVMNRYLKKRGDLERKAQDSKRDYSASKVPFDFKKELDALNLLYSQLFLDLIRLHIHEKSPAIDRLCKILNLVRNNELSQRINKSNEVRVFNIGFAVDVLNLLYKNFAIFPLKESGELCLIVSNPSHVRHDCTLENLAGQSGFIFFPFCANHNNENVFFKVDNNVIIGKDNIINFAINLLFNVYSRMLLHASLNSLPDLKKTCNLVLYMIYIQRHNSEAIKRNYDIYSFYRYIKMSMPEFFTDGADFIKEELSKDIYRHAFDRASTFIRQNECRKLVLSRRNDFEFEKSVGSVFDACLGKYKDTAFTYLIKNDVKGIWIGASPEILASFNNNVLSTVSLAGTMPVIEDLSLAKWSEKNQKEQQLVTDYIEDVVKKYTSSYHKSDVYTAKAGPVMHLKTDFKAHVGNLHTALSLARELNPTPAVCGLPKDEVKAFLVENEGYDREYYSGMVGYINNSEFSFYVNLRCMRIIKQTASLYVGGGVLPESNFEDEFDETCHKLETMKTLLKNK

SEQ ID NO: 93280 - protein, 475 aa, Anaerococcus tetradius
  misc_feature (1)..(475): tr|C2CI81|C2CI81_9FIRM Salicylate synthase OS=Anaerococ cus tetradius ATCC 35098 OX=525255 GN=HMPREF0077_1191 P E=4 SV=1
MIFINIYVKIKLVKTNLIKEDNMPKINRGTYDKATIDISDNDNLNSFVLAIKIIEDVANEIQPYMVYENFNEISVAIGEYIGIEVYTEKILITENGDTVEHKVSDLSEDMKKVFENINFTDWRMYGIADFNYAKHTFLKNVSDKEVLLKMFIPRTDIRILEGSIEVKSVDNIDEIISAVEKCTINSTKEELKKNTSQVDLEKLKSIDSEYYKEIVSKGIEEINNDKYDKVILSRKIKLEKKILLKDSFLLGRKYNTPARSYCLKIGDVEVIGFSPETVVEVDEEKKVYTFPLAGTRALTDDPIKNKELKCELLKDPKEIAEHAVSVKLAFEELEKVCIKDSISVVKFMEVLERGSVQHLASRLKGTLKEEFNEWHAFTALFPAVTASGIPKAECIDAIDRLEKDERGLYSGGVLTYDQNGTMDVALALRTAFQTDKETWIRVGAGIVKLSKAERELEETKEKAGSILDKLVYIED

SEQ ID NO: 93281 - protein, 442 aa, Anaerolineaceae bacterium
  misc_feature (1)..(442): tr|A0A3A4QL95|A0A3A4QL95_9CHLR Isochorismate synthase O S=Anaerolineaceae bacterium OX=2024896 GN=C4586_02660 P E=4 SV=1
MNRIVNYTVPFHPHSLTEFLRFGSGMERFYFESNQSPLAIAGLGIAAQISHNGANRFANLGQSLDDFFQHIICVNESDALPRPVLLGGGSFFDQTEHGNWASFPQAALTLPHYALIRVNGEFFFSVNQLSAENESLADASRRAQREAESLLARLASAILPTPSIPDEITSSETSRRTWEEIFQQSIALIRDHKLKKVVMARPLQAHGNRPMDIPALLVRLGESCPSCFRFLFEFRPGVTFAGSTPERLVAVSGAKFTTTAIAGSIRRGDHPAEDEALGQQLLDSAKDQSEHTFVLDQIREKMLPLTESLSIDSVPKLLRLPNIQHLRTDITGTLHPDRNILNIVAALHPTPAVGGVPVEAALRVIRELEGFERGWYAAPVGWVDANGDGDFVVAIRSGLFQGNTATLFGGAGIVADSDPQKEWDETGLKIHFLLNALQGELA

SEQ ID NO: 93282 - protein, 436 aa, Anaerolineae bacterium
  misc_feature (1)..(436): tr|A0A3M1MU64|A0A3M1MU64_9CHLR Isochorismate synthase O S=Anaerolineae bacterium OX=2052143 GN=D6755_06875 PE=4 SV=1
MKTAARTLVWHAVPSNERSLLAFLRRAGGQPRFFWQQDEISLAGIGIALQIHAAGENRFSHVQAQAEEWFRGMHAAPQSDTPPWVHPYLLGGFAFSPEHEPAGIWEGYPAAWFILPRYTLLRKGNRTWLLAAAISDSPNPEAARELLWELPAPQARPHTPPALPAVSEYPRRAEWEAAVTQATQHIRAGRFRKVVLSRRRRLRVQSPVDPLLALDRLRLRYPNCYRFLFEPRPGHAFFGATPELLVSARDGQVRTMALACSMRRGVTLEEDAELGARLLHSAKDRHEHALVVEAIRNALAPLCQQMDIPAAPRLHRLSNIQHLLTPIHGRLRRGFTPLDVAAALHPTPAVGGLPRAAALAYIRQAEGQARGWYASPIGWLAPDGAATFAVALRCALTTGNEVHLFAGAGIVADSDPAAEWRETALKFRPVQEALVG

SEQ ID NO: 93283 - protein, 415 aa, Ancylobacter aquaticus
  misc_feature (1)..(415): tr|A0A3S0GIL5|A0A3S0GIL5_ANCAQ Isochorismate synthase O S=Ancylobacter aquaticus OX=100 GN=EJV44_20580 PE=4 SV= 1
MRRCAGAARTDATEVAPAVGFGAAAAPSVSPASDMPFVLVGAGETLVAGGALSSVGEGPEPLGARVRRLLAEGEGPDLVVGALPFGASAPAHLYRPAALSRHPGRGGFAAAMPLPRRAESLRPARWQVTPEPPLAAYQTAVAAALARMSQGGEGLRKIVLSRSLKIIADRLIDATALLRALAQDESVTAFCVPLPSTGAPRALVGATPELLVSRRGARVTSHPLAGSSRRAREAGADHAAAQALLGSEKDRREHREVVAAILDQLAPHCTDLAAPGEPELTSTASMWHLGTPITGRLRDASLSALDLALLLHPTPAVCGTPRNAAAAAIAELEGYERGFYAGAVGWCEASGDGDWHVAIRCAELSGREARLYAGAGIVAGSDPVAEGEETSAKFAALLTALGIDEKGNPVAEERA

SEQ ID NO: 93284 - protein, 376 aa, Ancylomarina sp.
  misc_feature (1)..(376): tr|A0A4V1N036|A0A4V1N036_9BACT Isochorismate synthase O S=Ancylomarina sp. SHSM-M15 OX=2501299 GN=EO244_09005 P E=4 SV=1
MKEDFVLKKTEAVLTTCLANHLAFYAYKHPNSQHIEIGIQKDMDLLKYTDFADLDGLSGFVMAPFVSTEQHSSWFIRDDFNFSSFGDDEIELLSQYKNTIEEKEDKTVTGSKQDEYFTQIAAFLDELKAGSLEKAILSRIQLEKGISEVKRAALFLQLCQCYPHAFVSFVSLPGICSWMGASPELLFKSQNNNSETVALAGTLPINKDHIQETEWGNKEIEEQAFVSDYIERVFRDNAICDYEKIGPYTVQAGQIVHLKTDFRTDANLSFKNKARIISALHPTPAVCGLPKTKALDLIKRVESHDREYYAGFWGPVHANGDCALYVNLRTMKLSENHLSLFVGGGITADSIPQKEWEETQHKAQTLLSVINQFVSS

SEQ ID NO: 93285 - protein, 458 aa, Anoxybacillus amylolyticus
  misc_feature (1)..(458): tr|A0A4R1GG81|A0A4R1GG81_9BACI Isochorismate synthase M enF OS=Anoxybacillus amylolyticus OX=294699 GN=menF PE= 3 SV=1
MAIGFRHHLQQQLHRLAVNAGRPFVSWAEPWEGVDPVSFFMQGPSCGFRERFFWADRTGGTILVGLGSVYAIETEKADSRFDDVEAGRRRWKKEMEPYGAADAPPLLFGGFSFDPYRPGTDMWRGFPAGKLVAPAALLAVRNGKTTLTVTVPTDKRGRDWERVGRLLERISDPMAAPKRLPRLVSDEEEEKERWLAAVREAIASIRAGALDKVVLARARRLAFAKTVDAAAVLQRLREQQPFAYIFAFEQDGRCFIGASPEQLVQKEGKMCRSVCLAGSVRRGADMEEDERLGAWLRADRKNNEEHQFVVQMIGRLFSSVCETVEMPPAPQLLKLPHIQHLCTPVVGRGSRERSVLRLVEMMHPTPALGGTPRDRALEVIRALEPLDRGWYAAPIGWVDGEGNGEWAVAIRSALLAGKEAMLFAGCGIVADSDPNSEYEETNVKMAPMLSALGVMNDG

SEQ ID NO: 93286 - protein, 451 aa, Anoxybacillus ayderensis
  misc_feature (1)..(451): tr|A0A1X6MBM7|A0A1X6MBM7_9BACI Isochorismate synthase M enF OS=Anoxybacillus ayderensis OX=265546 GN=menF PE=3 SV=1
MVTLYQNKVIDQLRDALKKKKHMVSVTVRVGQIDPLSFFAAGETLFHGQRFYWSDCFHEHTLVGLGHAQVIKSEEKTKKRFREVEKAWQQIVEGAFIEGEEPLMFGGFAFDPMKRSAEHWSHFPSAQFVLPKFLLTKRGEETWLTVNVVHESFTELEKMIDSLFIIHDEIDSYDVEVVEKEEVARDRWFHAVRHATDLIQDGEIEKVVLARELFLSFSHRIDRSHVLRSLREQQPMSYIFAFENGSTCFIGASPEQLVKKNGYMCETACLAGSIRRGHTMKEDEELGQWLLKDDKNRREHAFVVDMIEQAMHEICTEVIVPSEPTLLKMRHIQHLYTPVQAKIKEGVSIFSLVERLHPTPALGGFPKQKAVQTIRDIEPLDRGWYAAPIGWVDANGNGEFAVAIRSALLEDNEAHLFAGCGIVAHSDPLSEYEETNVKFKPMLLALEGGRR

SEQ ID NO: 93287 - protein, 451 aa, Anoxybacillus flavithermus
  misc_feature (1)..(451): tr|B7GK08|B7GK08_ANOFW Isochorismate synthase MenF OS=A noxybacillus flavithermus (strain DSM 21510 / WK1) OX=4 91915 GN=menF PE=3 SV=1
MVTLYQNKVIDQLRYVLGKKEHMVSITIRMEQIDPLAFFSAGETLFYGQRFYWSDCLHERTFVGLGRAQVIKSEEKTKKRFRDVEREWKQIVEGAFIEGQGPLMFGGFAFDPLKQSDEHWIEFPSAQFVVPTFLLTKQRDEIWLTVNVVHESLNQIEEMIDSLFHTRDESDWHRAHIVKKEEVARDQWLRAVHYATDLIRNDAIEKVVLARELFLSFSDRINCSQVLHELHEQQPMSYIFAFENGSTCFIGASPEQLVRKNGHMCETACLAGSIRRGHTMEEDEELGRWLLQDDKNRREHAFVVDMIKQAMNEVCTEVVIPNEPTLLKMRHIQHLYTPVQGKVKEEVSIFSLVERLHPTPALGGFPKEKAVQTIREIEPLDRGWYAAPIGWVDANGNGEFAVAIRSALLEENKAHLFAGCGIVAHSDPHNEYEETNIKFKPMLSALEGGWR

SEQ ID NO: 93288 - protein, 451 aa, Anoxybacillus gonensis
  misc_feature (1)..(451): tr|M5QUC2|M5QUC2_9BACI Isochorismate synthase MenF OS=A noxybacillus gonensis OX=198467 GN=menF PE=3 SV=1
MVTLYQNKVIDQLRDALKKKEHMVSVTVRVGQIDPLSFFVAGETLFHGQRFYWSDCFHEQTFVGLGYAQVIKSEEKTKKRFREVEKAWQQIVEGAFIEGEGPLMFGGFAFDPLKRSAEHWDHFPSAQFVIPKFLLTKRGEETWLTVNVVHESFAELEKMIDSLFVIHDESDNYDVDVVEKEEVARDRWLYAVRHATDLIQDGEIEKVVLARELFLSFSQRIDCSHVLRSLREQQPMSYIFAFENGSSCFIGASPEQLVKKNGHMCETACLAGSIRRGHTMKEDEELGQWLLKDEKNRREHAFVVDMIEQAMHEVCKEVIVPSEPTLLKMRHIQHLYTPVRAKIKEGVSIFSLVERLHPTPALGGFPKEKAVQTIRDIEPLDRGWYAAPIGWVDANGNGEFAVAIRSALIEDNEAHLFAGCGIVAHSNPLSEYEETNVKFKPMLLALEGGRK

SEQ ID NO: 93289 - protein, 412 aa, Anoxybacillus kamchatkensis
  misc_feature (1)..(412): tr|A0A4S3L540|A0A4S3L540_9BACI Isochorismate synthase O S=Anoxybacillus kamchatkensis OX=196180 GN=CI793_04975 PE=4 SV=1
MQTKEMIHATAEQLLAEYKAGISFFLASPRQTLLAQGMVAVVPTNGYENEKAQIIDHIKQVLKRVKQQGISHYPMVVGAIPFDHLYPAQLMVPSEVEWAGPLSFGQWKEPIEQQADREYKVTPIPSPEGYKDAVEQGLQRIKAGDLRKIVLSRSLQLTSTQKVDIPRLLRQLAVHNPTGYTFAAALPDRVVRADAAPHEITGNRTLVGASPELLVAKSGMQVIANPLAGSAPRSSDPEEDRRRAQELLSSAKNRHEHAVVIEAVANALRPFCKTLDVPEEPSLIHTETMWHLSTVIRGELSSSSITSLDLAFALHPTPAVCGTPTPVAKRAIQEIEPFERGFFTGMVGWCNEEGDGEWIVTIRCAEIEDHTLRLFAGAGVVEGSKPEEELAETSAKFRTMLLAMGLNDDILK

SEQ ID NO: 93290 - protein, 449 aa, Anoxybacillus pushchinoensis
  misc_feature (1)..(449): tr|A0A1I0SKW4|A0A1I0SKW4_9BACI Isochorismate synthase M enF OS=Anoxybacillus pushchinoensis OX=150248 GN=menF P E=3 SV=1
MVTLYQSKVIDQVRDALNKKRHMASVAVKIKQIDPLTFFEAGAKLFHGQRFYWSDCLREQTFVGLGHAYVIKSENKTSERFREVEYAWKQMVEGAFIQGEGPLMFGGFAFDPMKRSAEHWDNFPSAQFVVPTFLLTKKQDETWLTVNVVHESLEQIEHMIDSLFAQHEEGKWGGSYVVKKEEVARDHWLHAVHHAMRLIQHGVIEKVVLARELVLSFSERLNYAHVLRSLREQQPMSYIFAFENGSPCFIGASPEQLVKKNEDICETACLAGSIRRGHTIKEDEELGRWLLRDEKNRHEHAFVVDMIERAMNEVCAEVIVPSEPVLLKMRHIQHLYTPVRAKVHDDVSIFSLVERLHPTPALGGFPKEKAVQTIREIEPLDRGWYAAPIGWVDAKGNGEFAVAIRSALLHDHEAHLFAGCGIVAHSNPRSEYEETNVKFKPMLLALEGK

SEQ ID NO: 93291 - protein, 461 aa, Anoxybacillus sp.
  misc_feature (1)..(461): tr|A0A160FC71|A0A160FC71_9BACI Isochorismate synthase M enF OS=Anoxybacillus sp. B7M1 OX=1490057 GN=menF PE=3 S V=1
MATLYQHQIRKKLEMITKSACQPFVSWSGIVPSIAPVYLFKLGETSSFSERFYWSDRSNEVVYAGIGCTYVIAEEGDGPRFSIVEEKWHDFLNMTEVHGEEEKATPVLFGGFSFDPLKRKTDKWTHFSNAKFIVPTVLLSLKKDCAMITITVPSKNNQSMLEEIDRLLGLLYTKSFHPTPSLPRCVTYEEIRTDEWIHAVRQIIDGIQQGSFDKVVLAREVRLQFDGQLTPSAVLEHLCEQQPFSYLFAFEQAGSCFIGASPEQLVKKEEHTFYSTCLAGSIRRGRTSSEDESLGQVLLQDEKNLHEHLFVVEMIRQAMQDVCEDVKISPEPQLLKMRDIQHLYTPVIGKSDSRVSLLSVVERLHPTPALGGAPKEKALEMIREAEPLDRGWYAAPIGWMNAMGDGEFAVAIRSGLLQGNEAFLFAGCGVVGDSEPFSEYEETNVKLKPMLSALGVKQDER

SEQ ID NO: 93292 - protein, 451 aa, Anoxybacillus suryakundensis
  misc_feature (1)..(451): tr|A0A0K6GK29|A0A0K6GK29_9BACI Isochorismate synthase M enF OS=Anoxybacillus suryakundensis OX=1325335 GN=menF PE=3 SV=1
MVTLYQNKVIDQLRDVLKKKQHMVSVTIKMEQIDPLDFFAAGETLFHGQRFYWSDCLYERTFVGLGHAHVIKSEEKTKKRFREVEREWKQIVEGAFIEGQGPLMFGGFSFDPLKQSDEHWSEYPAAQFVVPTFLLTKQRDETWLTINVVHESLGQLEEMIDSLFHIRGESEWHRTDVVEKEEVARDRWIRAVHHATDLIQSGMIEKVVLARELFLSFSHRIDRSYVLRALREQQSMSYIFAFENGSTCFIGASPEQLVRKNGHMCETACLAGSIRRGHTIKEDEELGRWLLQDDKNRREHAFVVDMIEQAMNEVCTEVFVPSEPTLLKMRHIQHLYTPVQAKTREGISIFSLVERLHPTPALGGFPKEKAVQTIREIEPLDRGWYAAPIGWVDANGNGEFAVAIRSALLGDNEAHLFAGCGIVAHSDPHSEYEETNVKFKPMLLALEGGRE

SEQ ID NO: 93293 - protein, 451 aa, Anoxybacillus thermarum
  misc_feature (1)..(451): tr|A0A0D0RZQ0|A0A0D0RZQ0_9BACI Isochorismate synthase M enF OS=Anoxybacillus thermarum OX=404937 GN=menF PE=3 S V=1
MVTLYQNKVIDQLRDALKKKKHMVSVTVRVGQIDPLSFFAAGETLFHGQRFYWSDCFHEQTFVGLGYAQVIKSEEKTKKRFREVEKAWQQIVEGAFIEGEGPLMFGGFAFDPMKHSAKHWSHFPSAQFVIPKFLLTKRGEETWLTVNVVHESFVELEKMIDSLFIIHDEIDSYDVEVVEKEEVARDRWFHAVRHATDLIQDGEIEKVVLARELFLSFSHRIDRSHVLRSLREQQPMSYIFAFENGSSCFIGASPEQLVKKNGYMCETACLAGSIRRGHTMKEDEELGQWLLKDDKNRREHAFVVDMIEQAMHEICTEVIVPSEPTLLKMRHIQHLYTPVRANIKEGVSIFSLVERLHPTPALGGFPKEKAVQTIREIEPLDRGWYAAPIGWVDANGNGEFAVAIRSALIEDNEAHLFAGCGIVAHSNPLSEYEETNVKFKPMLLALEGGRK

SEQ ID NO: 93294 - protein, 459 aa, Anoxybacillus vitaminiphilus
  misc_feature (1)..(459): tr|A0A327YKY8|A0A327YKY8_9BACI Isochorismate synthase M enF OS=Anoxybacillus vitaminiphilus OX=581036 GN=menF P E=3 SV=1
MVTLYTNKIQEQLHMMMKMANANTSFISVNEKTDSVDPLRFFHLGEKFSFGQRFFWSDPVNEAVYVGLGCTYSIEARHHENRFAEVEREWKRFIEQVLFDQKGRGPLLFGGFSFDPLKAKTKRWVNFPEAKMIVPMMLLSNVKGESSITITIPTQNNEEELLRIEQMLALLQQETIVPYKHNATCVKMFEIEKDEWLTAVTKATSDIRNGELGKVVLAREARLLFDKRINPTVVLKRLREQQPFSYIFAFESGSDCFLGASPEQLVKKDDDMCYSTCLAGSIRRGKTLKEDEELGNWLLQDSKNLHEHRFVVDMIKEAMLKVCDEVIIPDQPSLLKMRDIQHLYTPVRGFSRQPISLLSLVERLHPTPALGGTPRSKALQKIREIEPLDRGWYASPIGWLDANGNGEFAVAIRSGLLQGNEASIFAGCGVVGDSDPLSEYEETRVKFKPMLSALGGSEK

SEQ ID NO: 93295 - protein, 459 aa, Aphanocapsa feldmannii
  misc_feature (1)..(459): tr|A0A524RVF6|A0A524RVF6_9CYAN Isochorismate synthase ( Fragment) OS=Aphanocapsa feldmannii 277cI OX=2507554 GN =ERJ68_01145 PE=4 SV=1
FAELLDQARWAAAALADDAVLCLGLPLDPLDPLAALPMLPLQQSFRNVWDGAPGLTVVATGVEQSLEMRGPRRFPLAQRFVNATLQRVLRAHHCDWAPSRPRVCLAFSFFDQVDGEGPAGVTAVLPRWQLARQGRRCWLLLLRAIGGDVTARSMAEELWEQSQRLEAPSPHPLTLPAVVHRDQDWLDSFCSGVSQALELISCGELRKLVLAARQDLLLDAPLDPLTLLHGLRLQQPGSCRFLWQDPNHPAAGMLVGASPERLMELRVGRLRCDALAGTAPTGPSQRQLLLGSRKDRHEHELVVEEMVRSLQQLGLRPKHRPMPRIARHGGLLHLHTPITAPAGKVAPLALAAGLHPTPAVAGLPRREALGWLRSLEGFKRGLYAAPVGWVDACGDADLRVAIRSGLVRGHRLTLTAGAGIVAGSDPERESREVELKLSVLQRSLGRGLPTLERCTASAV

SEQ ID NO: 93296 - protein, 474 aa, Aphanothece sacrum
  misc_feature (1)..(474): tr|A0A401IBP1|A0A401IBP1_APHSA Isochorismate synthase M enF OS=Aphanothece sacrum FPU1 OX=1920663 GN=menF PE=3 SV=1
MMRTRNNVDFSQAKLSLADKLKAFFIHDIFLLPNTDKFIRLEVPLNSLNLLSWLQQQKNNIKTYWSDREQKFEMAGVGEADVIHGQQTIDLASCFNHFHKFLSPDCKNLRYYGGINFNGKPILASCWQGFGNYRFIVPRFELYRDNQNTSLVCNFKLQHSDSYNRQLEYLLNELDELVFDSFYKSKELPEFIKREDIPNERDWDQNINMALASFERGETAKIVLARQAIFEFLGQVEPLTVLEILKKSNTRLFRFCFQPSEGNAFIGGSPERLYFRLEKLLQTEAIAGTRSRGKSLREDQKFGEELLNSDKDLREHKFVVHSLQGALAQMCHSVGLNREPMLLKLNKIQHLYTPCNGILFDEVSDAEILSKLHPTPAVGGYPKVQALEVIEQIETFERGWYASPVGWVGHDSSEFVVGIRSGLINNNKLSLFSGAGIVQGSDPQEEWQEIENKIGTFLQIMKYFDKIKTPIQIG

SEQ ID NO: 93297 - protein, 324 aa, Apibacter sp.
  misc_feature (1)..(324): tr|A0A563D902|A0A563D902_9FLAO Isochorismate synthase O S=Apibacter sp. AL1 OX=2509005 GN=ETU09_08525 PE=4 SV=1
MYKLPFAIIRLPKCSKYFLIENDKNGSNLYKFNSFNNSKQYILSYHNLIELHKPEFKNLNFSLSKSEEVKILNKNDYITLVNKTIDYIKNSNALKIVISRNLWLSRSNINPINSFLALCDANPNSFCHLSVWNNDEIWIGSTPEILGYYDNSIFKTMALAGTLPNKNSYHWSEKEIYEQKLVSDYIYQILNIYCDNISILGPETYGLNHIKHLVTHFSSQIKNDKSIYELINALHPTPAVCGLPLNLSKKFIDENEGYDRDFYAGFIGLEDISFKKYFVNLRCGKLFSNGALLFVGGGITAQSNPEKEWYETEMKSKIIVECLK

SEQ ID NO: 93298 - protein, 383 aa, Unknown
  misc_feature (1)..(383): tr|A0A2H9ZV94|A0A2H9ZV94_9ASPA Isochorismate synthase / 2-succinyl-5-enolpyruvyl-6-hydroxy-3-cyclohexene-1-car boxylate synthase / 2-succinyl-6-hydroxy-2,4-cyclohexad iene-1-carboxylate synthase / O-succinylbenzoate
MITIALKLLTSNKQQPPCRQYMIINPLAITAAFANINPNPNSQAAIFLLIRRESEGEKMVNWVEAQKPLLHGLVKMAGLRQLTVEIEPGTSMSFWVPKDKLPKTKNTTKEVFPVGKTGSVSGANKKEKPVVVLIHGFAAEGIVTWQFQVGALTSRYAVYVPDLLFFGGSVSTSADRSPEFQAHCLAMALGRLGVARCTVVGFSYGGMVAFSMAAARPELVEAIVVSGSIIAMTDSISTETMERLGFSSSKELLLPQTVKGLKALFKVATYKKLWLPERLFKDYLKVMFNNRKERAELLEALINSSKEANVPVFRQRILLLWGENDNLFNVGLAKDMKEQLGEIATLQPVKKAGHLVHLERPCVYNRQLKQFLALVNSSSENKI

SEQ ID NO: 93299 - protein, 462 aa, Aquibacillus sp.
  misc_feature (1)..(462): tr|A0A516KHR1|A0A516KHR1_9BACI Isochorismate synthase M enF OS=Aquibacillus sp. TKL69 OX=2594883 GN=menF PE=3 S V=1
MIETQIPMLEQALEQALSVWKVENKPQLISITEKMDAIDPFIFFDRGTKWKGKRIFWSSSQESFFLVGVGEAISIDSNNQDFLQTEEQWKSLLKEASIYNAFQVPGTGPVAFGGGSFDPDKKSTKLWKEFKETQFRIPSYLLTITNGETYVTFNAMVASDEDTVSIRQDMLLAKQYLLAEQKGLPAGPSIVQKEEIASDQWKELVEKATNEIKSGQAKKIVLAREMRVDFEEDASLSSILYQLHESQTNSFIFAFENERDCFLGASPERLVRLQDNELLSTCLAGTAPRGVTREEDEKIGAALLADEKNREEHDFVVQMIRNAVEACCEQVHVPSDPVLYPLRNLQHLYTPVQAVLKKGYSILDVVQRLHPTPALGGLPREESMMFIREFEQLDRGWYGAPIGWMDAYQNGEFAVAIRSALLQGKSASLFAGCGVVKDSEPEAEYQETMIKFTPMLSVLGGS

SEQ ID NO: 93300 - protein, 360 aa, Aquimarina algiphila
  misc_feature (1)..(360): tr|A0A554VBS8|A0A554VBS8_9FLAO Isochorismate synthase O S=Aquimarina algiphila OX=2047982 GN=FOF46_27590 PE=4 S V=1
MNIDNVYTDLKKQLKAELPFVIYRKANTQEIDVFLQEDDELYEYKDNTISGFVFAPFNTLEKTVLIPMDKSICYTVTITSPTNIDKNENDVKYDSVLVSSAKEEHMQLVRRGIDAIKAKCFKKVVLSRKEEVVCENNDALEIYKRLVMNYPKAFVYCWYHPKIGMWLGATPETLLHVKENHFYTMALAGTQPYLGEMNVEWGDKEIEEQKMVTDFILDELTPVSKRIESSNVYTYRAGTLLHLRTDIKVVLKTASSDIAKVIQIVHPTPAVCGLPKKEAKSFILEYEGYNRKYYTGFLGELNVNKNGKIESSLFVNLRCMEMKPDKAILYVGGGITKDSEPEKEWEETVKKTETMKKVLF

SEQ ID NO: 93301 - protein, 360 aa, Aquimarina sp.
  misc_feature (1)..(360): tr|A0A3A9VG20|A0A3A9VG20_9FLAO Isochorismate synthase O S=Aquimarina sp. AD10 OX=1714849 GN=D1816_05610 PE=4 SV =1
MNIKDVFTKINKQYQDKLPFVVYRKPGEDILKCLLQKNDVLHQMDSYDTSGFVFAPFDNKSKSILIPVKNSEHYQCALAKLVAPENIDSFRENRTVNDLSKQEHIKLVNKGIQEIKSGILKKVVLSRKEEVDFTNNNLLDVFSELLNKYPNAFVYCWYHPKVGLWLGATPETLVETKEGSFHTMALAGTQPYIDTVDVQWGDKEKEEQAMVTDFVLKQLSSVIKNISSSERYTHKAGTLLHLRTDIQGGISDEMIPQFHNVINVLHPTPAVCGLPKDNAKSFILQEEGYDRKYYTGFLGEVSFASNEEMQSNLYVNLRCMSISENKASIYVGGGITKDSIPELEWEETVRKTETMKNVLL

SEQ ID NO: 93302 - protein, 404 aa, Aquimixticola soesokkakensis
  misc_feature (1)..(404): tr|A0A1Y5T939|A0A1Y5T939_9RHOB Isochorismate synthase D hbC OS=Aquimixticola soesokkakensis OX=1519096 GN=dhbC PE=4 SV=1
MQVLNIDIEGAQTASSAGRSAPKTHPKTHPETHPAPEAGLSGCAFLLGQDFGEITKTYTATLAQFATCDLTQAIPDDGHETAPQAGRLFGVFPFDRTDQGHLYRLSPKATPAQVAADEAVSHSLTRLPETQGFGASVDAVAQKINAGDGGLKKVVLARSLVYDTDAPIDPVQVALRLSADRHVTSYCVPLPGESAAPRWLVGATPELLLSKQGAAIRSHPLAGSARRQSDASADAAVGQALLTSEKDNIEHRVVVEYIHDVLTPYCRSLKVPDQPQLDRTATMWHLGTAISGVLKEADTPVLALLRDLHPTPAVAGFPLAAALAQIDAQEPFARDFYAGTLGWLDGDNNGAWHVTLRCAVIAQHSAQLFAGAGIVGASKAADEIAETRAKFGAMRLALGICERL

SEQ ID NO: 93303 - protein, 459 aa, Aquisalibacillus elongatus
  misc_feature (1)..(459): tr|A0A3N5AYZ2|A0A3N5AYZ2_9BACI Isochorismate synthase M enF OS=Aquisalibacillus elongatus OX=485577 GN=menF PE= 3 SV=1
MLQTKQLSLREQLMTIQEQLNKHEQVNVSIVESIDDINPVDFFASFDRQELVRTFWKDPKEGTFFIGVGQLETFESKGKQRFDSMKEQWNHFISNISIPNEAPKGTGPMLMGGFSFNEKISSDKWSSFEPGLMVLPEMMLSVFNENSYMTYNVTVSQNTDLDQLVNRLKNWEQGVSSAAENKTDLVSTNSLDYRNWNQLIEQAVASIKSGELGKVVLARELEATFEQVIPINSVLERMVNQQKDSFIYVFDQGEEVFVSATPERLVRVDGDELLSTCLAGTISRGETLEEDEALASSLLNDEKNRNEHQYVVNMIKEAVEPLTDSVDIPEKPVIYPLRALQHLYTPVTAKLKHSNSIFDLIKKLHPTPALGGEPRNEAMRFIKHYEPFERGWYAAPIGWVDHQGNGEFAVAIRSALVQKDQATLFAGCGIVEESDPQEEYEETKLKFTPMLEALGGISQ

SEQ ID NO: 93304 - protein, 569 aa, Arabidopsis thaliana
  misc_feature (1)..(569): sp|Q9S7H8|ICS1_ARATH Isochorismate synthase 1, chloropl astic OS=Arabidopsis thaliana OX=3702 GN=ICS1 PE=1 SV=2
MASLQFSSQFLGSNTKTHSSIISISRSYSPTPFTRFSRKKYESCSMSMNGCDGDFKTPLGTVETRTMTAVLSPAAATERLISAVSELKSQPPSFSSGVVRLQVPIDQQIGAIDWLQAQNEIQPRCFFSRRSDVGRPDLLLDLANENGNGNGNGTVSSDRNLVSVAGIGSAVFFRDLDPFSHDDWRSIRRFLSSTSPLIRAYGGMRFDPNGKIAVEWEPFGAFYFSVPQVEFNEFGGSSMLAATIAWDDELSWTLENAIEALQETMLQVSSVVMKLRNRSLGVSVLSKNHVPTKGAYFPAVEKALEMINQKSSPLNKVVLARNSRIITDTDIDPIAWLAQLQREGHDAYQFCLQPPGAPAFIGNTPERLFQRTQLGVCSEALAATRPRAASSARDMEIERDLLTSPKDDLEFSIVRENIREKLNGICDRVVVKPQKTVRKLARVQHLYSQLAGRLTKEDDEYKILAALHPTPAVCGLPAEEARLLIKEIESFDRGMYAGPIGFFGGEESEFAVGIRSALVEKGLGALIYAGTGIVAGSDPSSEWNELDLKISQFTKSIEYEATTSLQAIN

SEQ ID NO: 93305 - protein, 456 aa, Unknown
  misc_feature (1)..(456): tr|A0A343TFR5|A0A343TFR5_9ARCH Menaquinone-specific iso chorismate synthase OS=archaeon AArc-Sl OX=2055893 GN=m enF PE=4 SV=1
MESPRTRNRSGLVSRARQLPETSLRTAFDALSPPRIVWGPPEGALVVAGGAAATIEAREGNRFREVASATEALFDSGDVHAGTEAARPRVFGGFSFNNGDGKYRESDGGSPWDGYPDARFLLPRVQVTITDRGAWLTVTDAGENARVEDVERRLDAEFDRLTGATSTGTRSSPPGIAERRRTTTREEWSSSIRSALDRIERNELTKVVFAQALEIDLEGQLDPASTLDRLGEAYPDCYRFCFETPDGEAAFFGATPERLVSLRGRTVETGALAGTIGRGETPAEDEWLAEQLRTDPKNAHEHELVVEAIREQLSPFSASVATGDRRIKRLATVQHLWTPITAELTDDRGVLELVEALHPTPAVGGVPPERALETIGETEPFDRGWYAAPVGWVDAAGNGEFAVALRSALSTGSRATLFAGVGVVGDSDPDEEWDEAQLKFQPVLNVLDDGDEREET

SEQ ID NO: 93306 - protein, 412 aa, Archangium violaceum
  misc_feature (1)..(412): tr|A0A084SXI5|A0A084SXI5_9DELT Isochorismate synthase O S=Archangium violaceum Cb vi76 OX=1406225 GN=Q664_10780 PE=4 SV=1
MVGNSCASRMLAAQLLESYEAGSSFFFASPKRTLLARGTFATVPHSGGTNGGTNALARLPERVAAVLNEAREADHDIPVAVGAVPFDSSIPAQLVVPMTLQRAGPLEFGSDVPAQRPLAERYTVQPVPEPAAYLNGVSRALELMGSGPLRKVVLSRALQLSTATPIDLRQLLRNLARRNPSGYTFAVDLPPLKGSAPEAGRRTLIGASPELLVSRSGFQVVANPLAGTTPRSADPVEDQERAAALRVSPKDLHEHAVVIDSVAEALRPYCKNLVVPKEPSLVSTPTLWHLSTRISGELLDPSISSLTLAVAMHPTPAVCGYPAELAHEAIGSIEPFERGFYTGTVGWCDANGDGQWAVTIRCAEAGENSLRLFAGAGIVAGSKPESELAETEAKFRTMLQAMGLGQGVEVQR

SEQ ID NO: 93307 - protein, 452 aa, Ardenticatena maritima
  misc_feature (1)..(452): tr|A0A0M8K917|A0A0M8K917_9CHLR Menaquinone-specific iso chorismate synthase OS=Ardenticatena maritima OX=872965 GN=menF PE=4 SV=1
MLREETMTSHLSTRQGGRFPNLNTPVVLTRRCAPIAPHALLHVGKGHARFFWQTPQGQTVAAFGVMHRLQTRGADRFVHMAAAAQNVLANLRTTGAPDAPAPLLVGGFAFDNRQAYGWEGFAPADFILPRVVLRTDERGTWLSVCAEDETKAEKLWQAVVEAVHRAPAVGATTLPRIQHETRAPDEHTWREMVQQAIESIRADVVQKVVLARTCRVQTNAPVDPLAALARLQARYQGCFIFLVEPTPGHAFFGATPEILADVQGTTLRTMALAGSIGRGATPEEDAARAAELLNSAKDRREHAFVVQAILRHLRHLAHDITSAPAPSLLRLPNIQHLHTPITATLNADVRIWDVVAHLHPTPAVGGVPRERALALIHELEPFARGWYAAPVGWVDAEGDGTFVVAIRSALAVARTLTLYAGAGIVADSDPQREWHETGLKFRPLLEAIGIHS

SEQ ID NO: 93308 - protein, 369 aa, Arenibacter algicola
  misc_feature (1)..(369): tr|A0A221V2K0|A0A221V2K0_9FLAO Isochorismate synthase E ntC OS=Arenibacter algicola OX=616991 GN=entC PE=4 SV=1
MSLGFLDQIEEHFRQGLPFVAYRKPNKAEVKVIFQNDRELHYTNNFTESGFVFAPFDGVGPAVLIKEDEALEETFESEPVNAINPISPSLDQDSDKDFYLKLIEQAIKSIDSGNLKKVVLSRSIEVGTSKTPFVMFSDLLLQYPKAFCYIWFHPKIGLWLGATPEIFLETENNKFRTMSLAGTQLHKVGEAPIWKEKELEEQEMVTQFIQSSLKDKVSSLEVSEAMSIRAGNLWHIKSSVSGNMNNSRLQEIIEVLHPTPAVCGLPKNAAKEFILENENYERQFYTGFLGELNFKEDIRRPSTRKNQENMAYRTIKNRTSLYVNLRCMQVLENKVKVYVGGGITSRSVPDKEWQETLDKSRTMLNIVLK

SEQ ID NO: 93309 - protein, 366 aa, Arsenophonus endosymbiont
  misc_feature (1)..(366): tr|A0A3B0M3G4|A0A3B0M3G4_9GAMM Isochorismate synthase M enF OS=Arsenophonus endosymbiont of Trialeurodes vapora riorum OX=235567 GN=menF_1 PE=4 SV=1
MVNITEFMASVHQFLSEQQIDAGSVRQYEFPLPADITFPALDWLASQQFYTQFYWYHRDGHEEAVLLGEVKHFSNIADAEQFLQQQTAIPTMRIWGLNAWQPLPDNEYYADFVGNDSYLFLPRIEFRHRQEKWILAINIIDQQDLPDALQFLSKLQSVKPILPINSRIKRIQHLPEYQQWHDLTTQAVELINSGVMDKVVIDRQTDIPLTKPLNPASLLSASKAVNGQSYHFMMSFNAQHTFLSSTPERLYYLKFQQLYTEALAGTVVNSSDPIVRKTNSDWLMHDDKNQHENLLVVEDICQRLHNNSEKIDVSPPDIILLRKIQHLRRLIHVTLHHASDSECLYRLQPTAAVAGVPRKIAKHFLQ

SEQ ID NO: 93310 - protein, 431 aa, Arsenophonus nasoniae
  misc_feature (1)..(431): tr|D2U4H1|D2U4H1_9GAMM Isochorismate synthase MenF OS=A rsenophonus nasoniae OX=638 GN=menF PE=4 SV=1
MVNISEFMASVYQFLSERQIEGKSGQQYQFSLPADIQFPALDWLASQQFYPQFYWHHRDGHEEVALLGEVKHFTNIVDAEQFLQQQSATTTMRIWGLNAWQPLPDNEYYAGFVGDESYLFLPRVEFRYCQERWILAVNIIDQQDLPHALQFLAELQLVKPISPLNSHIKQVQHLPEYQQWRDLTTQAVQLINSGVMDKVVIARQTDIQLTKPLNAASLTSASKAVNRQCYHFMLSFNAQHTFLSATPERLYYRKFQQLYTEALAGTVVNSSDQAIRQTYSDWLMNDDKNQHENRLVVEDICQRLQNNCEKISVSSPDIILLRKIQHLRRLIRVTLRDASDSDCLNRLQPTAAVAGVPRKTAKHFLQQNEPICRGWYAGSAGYLSLNQSEFVVSLRCAHLNDDHLRLYAGAGIVNDSDPWQEWLEVENKAAG

SEQ ID NO: 93311 - protein, 454 aa, Arthrobacter agilis
  misc_feature (1)..(454): tr|A0A1Y3LXN7|A0A1Y3LXN7_9MICC Isochorismate synthase O S=Arthrobacter agilis OX=37921 GN=B8W74_06710 PE=4 SV=1
MSTPSLTALTPAPGQSRGLRSITMARGDMDPRTGLLDYVVRNDAHTWIRRGGGLVAYGETARFTVTGPDRFTRAQEWWRSELAGAEVEDHLGVPGSGLIAFGSFAFSKTSPHESRLIVPRVVIGCSEGRTWLTYITDDAEAELTAESAEAALAAYLAEPAPDRVPDAADRLGPGVLSEDQYKLAVADGVQHVQAGELSKLVLARDVVAHLGGPVATAQVLRELAVRYEDCWTYAVDGLIGSTPEMLIKVENNTARARVLAGTLDRKNAPQGDPDYPNRVLAGSDKQLHEHQIAIDSLTETLQPFTSSMTSHSEPFVLQLPNVWHLASDVTAELVADERGEVPTSLALVQALHPTAAVCGTPTTVAGALIRQLEHLQRGPYAGPVGWIDAGGNGEWGIALRGAVVETPTRVRLYAGCGIVEGSQPEAELAETWSKFRPMIEALGLTGPSGSSGYQ

SEQ ID NO: 93312 - protein, 446 aa, Arthrobacter echini
  misc_feature (1)..(446): tr|A0A5D0XTW0|A0A5D0XTW0_9MICC Isochorismate synthase O S=Arthrobacter echini OX=1529066 GN=FQ377_01260 PE=4 SV =1
MSTPSLTALTPAHGQSSGLRSITVAREDLDPRTGLLEYVVRDDAHTWIRRGGGLVGYGEITRFTVTGPDRFTRAQDWWRRELAGAEVLDELGIPGSGLIAFGSFAFSKTSPHASRLIVPEVVVGCTEGRSWLTYITRDPEAELSAAAAEAALAAWLLEPAADRSPSPGDRLAPGVLTEDQYTRAVAEGVEHVRRGELSKLVLARDIVAELERPIATAHVLRELAVRYEDCWTYAVDGLIGSTPEMLIKVENNTAEARVLAGTLDRADAPADDPGYAERVLAGSEKQLHEHQIAIDSLTETLAPFTSSMTSHSEPFVLQLPNVWHLASDVTARLTADDDGHVPTSLALVQALHPTAAVCGTPTTVAGALIRELEHLQRGPYAGPVGWIDAGGNGEWGIALRGAVIETPTRVRLYAGCGIVEGSTPEAELAETWSKFRPMIEALGIRR

SEQ ID NO: 93313 - protein, 468 aa, Arthrobacter nitrophenolicus
  misc_feature (1)..(468): tr|A0A4R5Y8X8|A0A4R5Y8X8_9MICC Isochorismate synthase O S=Arthrobacter nitrophenolicus OX=683150 GN=E2R57_00605 PE=4 SV=1
MTSTIRTLTVPLDGTAFPGGLPSFLVRDDVLCWTRREAGLAGFGEIARFTAAGPERFLEADIWWRHLVIEADVTDHVELPGTGPVAFGSFAFSKTSAHESRLIVPEVVVGVRDSQVWVTQLTLGDGELTEQSALAALDRWLGSGSADTPAAFATVTTAAADSATEAQQGAVPGRAGAAVVRPLPLAAGATLHTGSLSEEAWMEAVTAGVAEIRTGALEKLVLARDVVATIPTGVNAAKVLRELAARYRECWTYGVDGLVGATPEMLIQVEGRTAQARVLAGTLDRRDAHGEDGLPMDYATRVLAGSEKQRHEHEIAIQSLTRQLAPFSEAMNAHDEPFILELPNVWHLASDVKAELTEVEGHVPTCLALINALHPTAAVCGTPTQVAGALIRKLEHLDRGPYAGPVGWLDAAGNGEWGIALRGAVIEGPETVRLYAGCGIVDGSQPEAELAETWAKFRPMLESLGISS

SEQ ID NO: 93314 - protein, 449 aa, Arthrobacter oryzae
  misc_feature (1)..(449): tr|A0A3N0BJX9|A0A3N0BJX9_9MICC Isochorismate synthase O S=Arthrobacter oryzae OX=409290 GN=D7003_18980 PE=4 SV= 1
MTSAFRTLTVPLDAESFRGGLPSFLVRDDVLCWTRREAGLVGFGEIARFTVTGPDRFLEADIWWRHLVLEAEIEDSVECPGTGPVAFGSFAFSKVSRHASRLIVPEIVVGLLDGRAWLTHMTFDDGDLTEAGALAALHRWLDTAGSSPAVEPSAGRSAGLPHTASAAREASLTTGALDEAGWMAAVTAGVAEIRTGALEKLVLARDIVATVPDGVNAAEILRQLAVRYRECWTYGVDGLVGSTPEMLIQVEGRTAQARVLAGTLDRRDAEGMAGSPLDFAERVLAGSEKQRHEHDIAIQSLTTQLAPFSEAMTAHSEPFILELPNVWHLASDVKAELTEVEGHVPTCLALINALHPTAAVCGTPTMVAGALIRKLEHLDRGPYAGPVGWLDAAGNGEWGIALRGAVIEAPGRVRLYAGCGVVEGSAPEAELAETWAKFRPMLEALGISS

SEQ ID NO: 93315 - protein, 451 aa, Arthrobacter rhombi
  misc_feature (1)..(451): tr|A0A1R4GV86|A0A1R4GV86_9MICC Menaquinone-specific iso chorismate synthase OS=Arthrobacter rhombi OX=71253 GN= FM101_14350 PE=4 SV=1
MNIDLPGSVAPETGSAQMQDAPAPRLRSITIPRAPGQESSLLDLLVRDDSLVWGRRGEGLVGFGEAVRFVADGPDRFRRLRRWWADVSTAAEVQDDVDQPGTGPVAFSSIAFSGTSAHASRLIVPRVLVGRSGDHGWLTLITDDPEAELSAATAEAELAGLLEETSIERDLSPGSDQLVPGRVSEDQYEESVRAGVRAIAAGELTKLVLARDAVAELGSPLAVSQVLRELALRYADCWTYSVDGLIGSTPEMLVKVSGNTARARVLAGTLDRATAPAGDDGYAERMLSGNEKQRHEHRLAIDSLTLELGPLVTGMVSPEEPFVLELPNVWHLASDVEAQLRVHDDGTSPSALDLAEVLHPTAAVCGTPTATAADLILRLEKMDRGPYAGPVGWVDAMGNGEFGIALRGGVIESPTSVRLYAGCGIVAASDPAAELAESWAKMRPMREALNL

SEQ ID NO: 93316 - protein, 451 aa, Arthrobacter sp.
  misc_feature (1)..(451): tr|J7LXA9|J7LXA9_9MICC Isochorismate synthase DhbC OS=A rthrobacter sp. Rue61a OX=1118963 GN=dhbC PE=4 SV=1
MTSTLRTLTVPLDVESSSGGLPSFLVRDDVLCWSRREAGLVGYGELTRFNTTGPERFLEADIWWRHLILEAEITDHVDVPGTGPVAFGSFAFSKTSPHVSRLILPELVVGIRDGRAWATQLTFDDGPLTEASVLASVDRWLTEPEPNGDGSASGGPDVGLSPDAIAADGSAGHLSRGSLSEAAWMQAVSNGVEEIRAGKLEKLVLARDVVANLPEGVNAAEVLRQLAARYRECWTYGVDGLVGATPEMLIQVEGRTAQARVLAGTLDRRDADGMDGSPMEYAERVLAGSEKQRHEHEIAIDSLTRQLAPFSEAMNSHSEPFILELPNVWHLASDVKAELADIEGHVPTCLALINALHPTAAVCGTPTLVAGALIRKLEHLDRGPYAGPVGWLDAAGNGEWGIALRGAVIEDANTVRLYAGCGIVEGSQPEAELAETWAKFRPMLEALGIKR

SEQ ID NO: 93317 - protein, 395 aa, Atlantibacter hermannii
  misc_feature (1)..(395): tr|A0A447LRS6|A0A447LRS6_ATLHE Isochorismate synthase O S=Atlantibacter hermannii OX=565 GN=entC PE=4 SV=1
MEASLAEETQQRAVTLSPDSFFFMSPHRNLATSGCLTRLTAPAADGEDLNGEFQQRLRETFAAARKLGCSRPIVVGAIPFDTRKPSALFVPREYQSFSHSEMLASARTAAPPQLQLTAQQAIPEKTQFLDMVERAAALTATPDVRKVVLSRLIDISTASAPDRHQLLNRLVALNPGSYNFHVPLADGGALIGASPELLLRKENQHFWSLPLAGSARRHPNQTEDKLVGDRLLNSTKDRHEHQLVTQAMRQILAGRSQRLEVPEIPSLITTPTLWHLATAIAGETRSEQENALSLACLLHPTPALSGFPHTVARQVIAELEPFDRELFGGIVGWCDDRGNGEWAVAIRCARLKDNQIRCFAGAGIVPASVAESEWHETGVKLSTMLNVFGLNDRSV

SEQ ID NO: 93318 - protein, 428 aa, Atlantibacter subterranea
  misc_feature (1)..(428): tr|A0A427V794|A0A427V794_9ENTR Isochorismate synthase M enF OS=Atlantibacter subterranea OX=255519 GN=menF PE=3 SV=1
MHSISTALQQIAQQLRAEFPVSPGVRRFAVPVSLNQTDPLAWLASQPVYPQFYWQQRNGDEEVAALGASRHFSTFDAAQTFLASQSDAALRIWGLNAFDTERSALFLPRLEWRRHGGSVTLALTVCSNHSLADDARAALAFIDALTPGEPLPTTPLDCVGERHFPDRAGWTQLINQATDAIAAGQFEKVVAARASDLQFSSPVSAAAFMAASRRVNLHCYHYFMAFAPDDAFLGSSPERLWRRIDSALRTEALAGTVANHPDEAKAQALGDWLMKDDKNQRENMLVVEDICQRLQNAVSSLDVLPPQIVRLRKVQHLRRCIWTELHQPDDSLCLHQLQPTAAVAGLPREPARRFIATHESFVREWYAGSAGYLSLKQTEFCVALRCARVTRQTVRLYAGAGIVAGSQPDEEWQEITNKAAGLRTLLVS

SEQ ID NO: 93319 - protein, 424 aa, Aurantimicrobium sp.
  misc_feature (1)..(424): tr|A0A2Z3S092|A0A2Z3S092_9MICO Isochorismate synthase D hbC OS=Aurantimicrobium sp. MWH-Mo1 OX=1987356 GN=AURMO _01648 PE=4 SV=1
MSVSATRGLRVESVPLTVTPELLNLLSVDSPLLWWRRGDGMVGIGVVETLSFSGKTRIKDAGATWREVAEAATVSDAVTVAGSGLMAFGTFAFRSTSEIPSVLIIPRFVVGQRAGVTWLTRIGFADESAEPLTTESAEQILAEHITASAQLGAAPVVHLSPASLSEAGFTSAVNKAIERIDAGEVEKVVLARELEGTLAGTQDLRVAITRLAESYPDCWTFSVDGLFGSSPETLITVHGRKVTARVLAGTARRGSDTATDLSNAAELASSHKDLDEHGFATRSVVNALTPYAEQLTVSDSPFTLKLPNLWHLATDIAGTLASGSNSLDLVFALHPTAAVAGTPTVAAVEVIDDLEPFDRGRYAGPVGWIGADGDGEWAIALRCAQLTGSTVTAYAGCGIVSDSVPANELVETEMKFRPIVDALS

SEQ ID NO: 93320 - protein, 424 aa, Avibacterium avium
  misc_feature (1)..(424): tr|A0A379ASB3|A0A379ASB3_AVIAV Isochorismate synthase M enF OS=Avibacterium avium OX=751 GN=menF PE=3 SV=1
MDNLQSIKQQLIDQISPSLPEQQGIACVQLEIESDLNLLSWLKGQQIYPQFYLNFRDCSQHIAVIGQLRCFSDLNQAQHFIQKSDYPLVGGVEFYGQSQFFLPRLYLEKKQNKLKIQLFIDVTNNFQYEHQACLEALKTFEKSTALNPIQQSIHFVKKQAEQAQWCNWVEKALDQIQQGIVNKIVLANATQFAAEDRLNAYDFLAESERYNFGCYHFLLAENAREIFIGSSPERLYQRQGNQLHTEALAGTALVSESEKETIQQSQWLLQDEKNIYENQLVVDDITHHLTPYSQHIEVSQLGLKTLRQVQHLRRQIVAQIYPEYGDNIFLNAIHPTAAVAGLGRNEALAFLRQTETFDRRWYAGTLGIMQKKWAEFCVAIRSAFIEQQQIRVFAGAGIVEGSIPLLEWQEIERKAFGLISLLQE

SEQ ID NO: 93321 - protein, 424 aa, Avibacterium gallinarum
  misc_feature (1)..(424): tr|A0A379AYA9|A0A379AYA9_AVIGA Isochorismate synthase M enF OS=Avibacterium gallinarum OX=755 GN=menF PE=3 SV=1
MDNLQSIKQQLIERISPTLPTQQGIACVQAEIETDLNLLSWLKGQKTYPQFYLNLRDSTQVVAAIGQVRDFSQLNQAQAFMQQSGYPLVGGVQFYGESQFVLPRLYLQQQENKLNIQLFIDQTKDIEQEHQACLNALKTFEKSTALCPIQQSIHFEKKRAEQREWCEWVEKGLQHIKQGVLNKIVLANETLFQSEGKLNAYDFLGESERYNFGCYHFLFAEAEECIFIGSSPERLYQRQGSQLQTEALAGTALVGENAQETEQQAQWLLQDEKNIYENQLVVDDIKQHLAPYSQHITVSPLGLKTLRQVQHLRRQISAQISPEYGDDIFLNAIHPTAAVAGLGRNEALAFLRQTETFDRRWYAGTLGVMQKEWAEFCVAIRSAFIEQEQIRVFAGAGIVEGSIPLLEWQEIERKALGLISLLQE

SEQ ID NO: 93322 - protein, 424 aa, Avibacterium paragallinarum
  misc_feature (1)..(424): tr|A0A0F5EXB0|A0A0F5EXB0_AVIPA Isochorismate synthase M enF OS=Avibacterium paragallinarum OX=728 GN=menF PE=3 SV=1
MDNLQSIKQWLMDQLYNASATQQGIACVEYVAEMDLNLLSWLKGQTIYPQCYLHFRDSPTIFATIGKVRSFLSLDLAQAFIQQTTYPLVGGVQFYGECQFILPRLLLLQQENKLKIQLFIDNNQPFAQEYEACAVALKTFEKHTALLPIRQSIHFVKKWAEQAEWCDWVEKALDQIQQGRLNKIVLTNETLFQSEGAIDAKDFLAESERYNVGCYHFLFAENADRVFIGSSPERLYQRIDHTLQTEALAGTALVGETKQETQQHANWLLQDEKNIYENQLVVEDIQQHLAPYSQQIQIAELGLKPLRQVQHLRRQICVQLQPEYGDSTLLAAIHPTAAVAGFRRDEALAFLRQTETFDRHWYAGTFGIMSQKWAEFCVTIRSAFIEREQIRVFAGAGIVEGSIPLLEWQEIERKALGLISLLQE

SEQ ID NO: 93323 - protein, 278 aa, Avibacterium volantium
  misc_feature (1)..(278): tr|A0A3S4HKH6|A0A3S4HKH6_AVIVO Menaquinone-specific iso chorismate synthase OS=Avibacterium volantium OX=762 GN =menF_1 PE=4 SV=1
MDNLQSIKQQLIERISPALPKRQGIACVQAEIETDLNLLSWLKGQKTYPQFYLNFRDSTQVVAAIGQVRDFSQLNQAQAFMQQSGYPLVGGVQFYGESQFVLPRLYLQQQENKLNIQLFIDQTKDIEQERQACLNALKTFEKSTALCPIQQSIHFGKKRAEQREWCEWVEKGLQHIKQGVLNKIVLANETLFQSEGKLNAYDFLGESERYNFGCYHFLFAETEECIFIGSSPERLYQRQGSQLQTEALAGTALVGENAQETEQQAQWLLQDEKNIYSC

SEQ ID NO: 93324 - protein, 401 aa, Azoarcus sp.
  misc_feature (1)..(401): tr|A0A4S4AAG7|A0A4S4AAG7_9RHOO Isochorismate synthase O S=Azoarcus sp. CC-YHH848 OX=2565932 GN=E6O51_20555 PE=4 SV=1
MNDVIRGVTDARARLLLEDYRAEDPFFFATAEHTLLARGCYATVPPAGDLVELSQVVDEQLQAARRNGHPNPIVVGAVPFDARRPACLSIPREVSFAGPLERGRAATWRPERYEVRPEPEPQAYADAVAEAVRRIRAGGLTKVVLARTLALTGGEAVDVPGLLERLAQRNTHGYTFAARLGGEGGEGDDGAAATLVGASPELLVSRRGLLVRSNPLAGSAARSGDAAEDARRGQALLGSAKDLHEHKVVADAVAAGLRPHCRRLAAPAAPALLHTATMLHLSSDIRGELAEPAANTLRLAASLHPTPAVCGHPGAAAFDLIGRLDAFDRGFYAGLVGWCDADGNGEWVVALRCAEVQGKRMRLFAGAGIVADSDPHSEVAETGAKFRTMLNAIGHVPEGAL

SEQ ID NO: 93325 - protein, 401 aa, Azospirillum brasilense
  misc_feature (1)..(401): tr|A0A0N7I8W1|A0A0N7I8W1_AZOBR Isochorismate synthase O S=Azospirillum brasilense OX=192 GN=D3868_24800 PE=4 SV =1
MDVLPLPTGERPPGGRSDPDFAFASRGRVLKAYGVNERLDVALDDRSFADGRWEEALDRAFRRRKAQGVENPILVGTVPFDGRQHARLFIPDHCDYEDAGRMAADPDPVALKAIEETVGRNAFEAAVTQAIGLFRDTALKKVVLSRPLDVEAREAFAPGRLLRALLRQNPGAHVFAAPVAYGQTLVGASPELLIRKTGRTVVSNPLAGSAPRSPSAEVERQRTAALLASTKDRTEHRYVVDAVCAALAGHCSPLSVPDAPSVIRTPTMLHLSTELTGELVDPTVSSLRLAHALHPTPAICGTPTGLARDAIDRLEGYARNWYGGMVGWMDSRGNGEWALSIRCGLVQGRHLRLYAGAGVVADSDPAAEWEETAAKLTTMLNLFGVASAQPSNTDLPVELAS

SEQ ID NO: 93326 - protein, 413 aa, Azospirillum doebereinerae
  misc_feature (1)..(413): tr|A0A3S1CFJ1|A0A3S1CFJ1_9PROT Isochorismate synthase O S=Azospirillum doebereinerae OX=92933 GN=EJ913_19280 PE =4 SV=1
MDVISPSAGDFPSDGDSPDPDFVFSSQGKVLKSFGIAERLPVALNSPDFTGGAWDERLRNAFRALKAKGVDNPIVVGAVPFDSRQPAQLFIPRRYEIADAARFVRDAGDDGAALEVAGIHETINRRHYESAVGQALDLFRTTALKKVVLSRPLDIEARRLFAPQSLAHALLRQNPGAFVFSVPVAYGQTLIGASPELLIRKTGRNIVSNPLAGSARRSPSREEEERRVKALLGSQKDKTEHRYVVDAVREALSGHCATLSVPEGPSVIRTPTMLHLSTEIAGELADPSVSSLRLAHALHPTPAICGTPTDPAFDAIGRLEGYARNWYGGMVGWMDSQGNGEWALSIRCGLASGRNLRLYAGAGVVADSKPAAEWEETAAKLTTMLNAFGLSAAVATAGSGMAGSEMAGLEMAS

SEQ ID NO: 93327 - protein, 409 aa, Azospirillum humicireducens
  misc_feature (1)..(409): tr|A0A2R4VTS7|A0A2R4VTS7_9PROT Isochorismate synthase O S=Azospirillum humicireducens OX=1226968 GN=A6A40_22500 PE=4 SV=1
MTHLLTMAPLAGHDPLAPLAGAADLADSVVFLSPSERLVGQGIGDQAGPAETDPDPARRVAHLLEAARRAGRAPVVMGAIPFDPSGRSRLVVPRRLDRLSPACWQAALQRLPGPPAPPRLLRSHPRPDPDGYRRAVENGLARIADGELAKLVLARSLDLEVADPIDPCRVLTALIRRHPGSLLYSVPLPAEDGREAGVFLGASPELLVRKAGGRVFANPLAGSIAASPDPAENARRIERLLASGKDRHEHAFAAHAVVETLRPFCRTIELPATPGVVAAGPIIHLSTPIVGELRAPWASALDMALALHPTPAVGGTPTAGAVAAIAELEGFDRGLYAGMVGWCDAAGDGEWAVSLRCAEIRGNRARLFAGAGIVDGSRPEAELEETATKLKTMLTALGLSAAEPTAPGF

SEQ ID NO: 93328 - protein, 483 aa, Azospirillum lipoferum
  misc_feature (1)..(483): tr|G7ZCG0|G7ZCG0_AZOL4 Isochorismate synthase (Salicyla te biosynthesis) OS=Azospirillum lipoferum (strain 4B) OX=862719 GN=pchA PE=4 SV=1
MLSDFLAIRLREALQGARRQAERHGETVLATASAPVEPSAFDLPSLFASRPKRLPAFLWLGTGDHGMVGLDVAWEAVAQGEERFSAIAAAWRRTAKNAVVSGEEGPVALGGFRFDPRRPTSELWRGFPDAVLSVPRFVLRLRHGRGQVIVSDAVDHATDIEARFTALLDAWSRLRELNRNPDSTESAMPELRERPGDRPAWTALVDRAVATIGRGELEKVVVARTVDMTFSAPVPTGSVLDRLRDANPKASVFAFERHGACFAGATPETLLTMENHAFQTMALAGSIGRGADPDEDGRAGERLLGSAKDRREHRLVVETLRRALEPFCTEIHTDAAPTLHKLPRVQHLMTRFGGRVRGGTSLIELVGRLHPTPAVGGVSLETALDFLRRHEDLDRGWYASPVGWIDTDGNGEFMVALRSALIDGRRATLFAGCGLVAGSEPDSEYRETLLKFVTMADALGLRELAVRAVPAPRTQTGTRPRPL

SEQ ID NO: 93329 - protein, 478 aa, Bacillaceae bacterium
  misc_feature (1)..(478): tr|A0A3E0JYY4|A0A3E0JYY4_9BACI Isochorismate synthase M enF OS=Bacillaceae bacterium OX=1889774 GN=menF PE=3 SV =1
MEGSSLVSIPCSDTLRDKVANAVNHVKKYSHPIILSYVFEIKEKDPLQIFSSFQSAYAGKRFYWATPDRTFILCGIGVELELTTDKKFSNRFFDIYSKWKDWKEHIQIEGAHPIGTGPLLFGGFSFDPLKNANSSKWKPFHEARFTLPSFMITKIGRHTLATINRVIQSTDDINEIINHFNTYEYTLKKKNEDTNSFLNFTIKKESLFYKKEWMAAVEKATEQIKQNRFEKVVLAREMLLEFEGSIDIHYVLSMLNEHQPNCYLFVVENEGKTFVGATPERLVSKRDQKVQSACVAGSIKRGKTVEADEEYAQMLLSDTKNIHEHQIVVKAIEKVFREYCQEVQLQNNPTILKTPNIQHLYTPVEGTVKKGFTLIDFVEKLHPTPALGGYPKDAALAFIRNEEPLERGWYAAPVGWMDDQDNGEFVVAIRSGLLDEQKAYLYAGCGIVGDSKPEEEYRETEIKFGPMQHALGGKLNEK

SEQ ID NO: 93330 - protein, 461 aa, Bacilli bacterium
  misc_feature (1)..(461): tr|A0A0K0GBT4|A0A0K0GBT4_9FIRM Isochorismate synthase M enF OS=Bacilli bacterium VT-13-104 OX=1637974 GN=menF P E=3 SV=1
MIELKEEQVETILEKAIEGINSDDDYQLVSITKKIKNTNALSFFESAKYINKNRTFWMSSEEDFYLVGIGQAYEIIAEESRFEETKKAWNQLLEKATIYNPYEQPGTGIVALGGLSFDPKKPTTPLWENFKPSHFTVPEFLMTKHNRECYLTVNILVRKNDHPRQLANECRDLENSLFQKSTIEKQMLTIKEKKEIEPTEWKETVQKAKEKINHSDIEKIVLAREMCLRFNENANIGPILQKLLDTHPSSYIFAIEKDDHCFLGATPERLVKLEKDHLLSTCLAGTAPRGKTKEEDQAISEGLLHDQKNREEHDFVVKMIKNAIKDCCTHLDVPNEPIIYPLTNLQHLYTPVTATLKKEYSLFDIIEKLHPTPALGGTPKEASLQFIREYERLDRGWYGAPIGWLDSNQNGEFAVAIRSALIKDTEASLFAGCGVVKDSNPDEEYEETNIKFLPMLSVLGG

SEQ ID NO: 93331 - protein, 474 aa, Bacillus aerius
  misc_feature (1)..(474): tr|A0A3A9DNG8|A0A3A9DNG8_9BACI Isochorismate synthase M enF OS=Bacillus aerius OX=293388 GN=menF PE=3 SV=1
MVTTVQRTFLREAPEALNIVKKVNHAVLISYSRKIESIDALSFFINGEEQFAGKRFFWSDPDGGLTLVGLGKEISVSTDLKDAGRYQAVHEKWERLKEKTFHFHEDQCTSQAAVGPLLFGGFSFDPLEDRKQHWNGYQEGAFFIPTAMLTQDGEETFITVNRWKAPEENVRKVLEEIKGAASQLIKADASRYPENGHARFTAKEELDVPEWLEAVRRATDDIKNGKYDKVVLAREILLTFDQPVELHRVLFNLMSEQKTSYIFAIEENGKSFVGASPERLVKKDGDNVLSTCLAGSIKRGESEQEDRMLGLELLNDEKNLIEHDIVVNMIHQALLSNCSNIKKPAKPGLYKTKNVQHLYTPIVGKMNAESSLFDLIEKLHPTPALGGAPQQKAIEVIRVLEPMSRGWYAAPAGWIDMSGNGEFAVAIRSGLIDSKEARIFAGCGVVADSDPHMEYEETQIKMKPMLSALGGDIR

SEQ ID NO: 93332 - protein, 472 aa, Bacillus aerophilus
  misc_feature (1)..(472): tr|A0A410KN29|A0A410KN29_9BACI Isochorismate synthase M enF OS=Bacillus aerophilus OX=293389 GN=menF PE=3 SV=1
MVTTVQSTFRQEALATLEEANNVNHAVLISYSRRVDDLDPLAFFQSGEADFLGERFFWSDPESQMIFSGLGRAAVIKSSEQGKERFNIVHQEWEQLKQHMFHFHDEKELKQAAVGPLLFGGFSFDPYEEKARHWEAFGEAHFFVPSMMLTVSKEGTFLTINEWNEVDGNVHQLIQELEQKASNFDALPVRNHGQAELVHMEELDVQEWMKAIHEATEHIRVNEYEKVVLAREVLLHYKNQIELAPLLAELLKHQTTSYVFAIEQGRQAFVGATPERLVKKSGGEVFSSCLAGSIVRGQDEVEDQALGEELLCDEKNLIEHQIVVNMIEQAFEANCHHVHKPNQPSLYKTKNIQHLFTPIVGEIKSSCSLFSLIEQLHPTPALGGYPKEKAVEVIREIEPLKRGWYAAPVGWIDSKDNGEFAVAIRSGLIEEDQVRLFAGCGIVEDSLAKQEYEETQVKLRPMLSALGGRPIE

SEQ ID NO: 93333 - protein, 464 aa, Bacillus albus
  misc_feature (1)..(464): tr|A0A1J9TP76|A0A1J9TP76_9BACI Isochorismate synthase O S=Bacillus albus OX=2026189 GN=BAU25_27380 PE=4 SV=1
MIQTKQIGLQEVLSAAIKRATDEKVLVSFVKQIDWMDPLLFYAAGKRIAFENRCYFADPAQHVIFAGIGSVFTIATASHKRFQTARDEWDKVKEKAFVQRERYEFGTGPLLFGGFSFDQEKEKTDLWKEFDDTTFSLPAFLLTVKNEKAWLTMNTFVSATDCAETLYNEIVSLEEKIFGESKCALEGSKLTVTSKVEVDPKGWMKAIEKVQDEMKQGNVQKVVLARELKVEMDHHIDSALVLEALRIGQPDCYVFSFDYKGACFLGATPERLIRKEGEKFTSMCLAGSTGHGQSIEESKRNSNALLHDEKNLAEHGYVVNMIRGVLNEHCEYVNIPESPGLLTTKNLIHLYTPVEAKGDASLLTMVEELHPTPALGGTPRLEAMKLIRDVELLDRGLYGAPIGWIDDEGNGEFAVALRCGLLNGEKASLFAGCGIVIDSVPQLEYEETSLKFRPMLGALEELMK

SEQ ID NO: 93334 - protein, 472 aa, Bacillus altitudinis
  misc_feature (1)..(472): tr|A0A5D4P9E8|A0A5D4P9E8_9BACI Isochorismate synthase M enF OS=Bacillus altitudinis OX=293387 GN=menF PE=3 SV=1
MVTTVQSTFRQEALATLEEANNVNHAVLISYSRRVDDLDPLAFFQSGEADFLGERFFWSDPESQMIFSGLGRAAMIKSSEQGKERFNIVHQEWEQLKQHMFHLHDEKVLKQAAVGPLLFGGFSFDPYEEKARHWEAFGEAHFFVPSMMLTVSKEGTFLTINEWNEVDGNVHQLIQELEQKASNFDALPVRNHGQAELVHMEELDVQEWMKAIHEATEHIRVNEYEKVVLAREVLLHYKNQIELAPLLAELLKHQTTSYVFAIEQGRQAFVGATPERLVKKSGGEVFSSCLAGSIVRGQDEVEDQALGEELLHDEKNLIEHQIVVNMIEQAFEANCHHVHKPNQPSLYKTKNIQHLFTPIVGEIKSSCSLFSLIEQLHPTPALGGYPKEKAVEVIREIEPLKRGWYAAPVGWIDSKDNGEFAVAIRSGLIEEDQIRLFAGCGIVEDSLAKQEYEETQVKLRPMLSALGGRPIE

SEQ ID NO: 93335 - protein, 470 aa, Bacillus amyloliquefaciens
  misc_feature (1)..(470): tr|A0A4V7TSK1|A0A4V7TSK1_BACAM Isochorismate synthase M enF OS=Bacillus amyloliquefaciens OX=1390 GN=menF PE=3 SV=1
MVTTVQHTFREEADHALHKAKQVNHAVLLSYSRRIASLDPLSFFKDGAKKYKGKRFFWSEPGSELTIVGLGTEALFQSNEKNKKRYHDVFEQWERFKKTAFHIHEEEAAHTAVGPVLFGGFSFNPAEERGDEWNGFEEGLFFIPSLMLTKTADGDYLTVNQWAADGNQAEDVLKRLKSFSEAFAVSSMAYEEYPALTKAEELDVENWLEAINTATNDMKANQYDKVVLAREVVLSFDGPIPVESVVRKLLTDQTTSYVFAIEQGNKCFVGASPERLIKKSGKDVMSSCLAGSIKRGKNQQEDDCLGNELLHDGKNLAEHDFVVQMIHDAFLSSCSDVKKPAGPQLYKTKSVQHLYTPIVGHLKTSASLFDLIEKLHPTPALGGAPQQKAVEVIAEIEPMTRGWYAAPIGWMDGRENGEFVVAIRSGLIEDKSARLFAGCGIVEDSDPQSEYEETQIKLKPMISALGGERL

SEQ ID NO: 93336 - protein, 399 aa, Bacillus anthracis
  misc_feature (1)..(399): tr|A0A2A7D6S5|A0A2A7D6S5_BACAN Isochorismate synthase O S=Bacillus anthracis OX=1392 GN=CON16_19245 PE=4 SV=1
MNEHTAVKELSEKLLEDYKTESSFFFASPTRTILAEGEFTTVKHREIESFSELVQATLSNAKQAGNPNPIVVGALPFDRRKEVQLIVPEYSRISERLQLDTTNQLETNENATFEMTPMPDPEVYMNGVKQGIEKIQDGDLKKIVLSRSLDVESSAKIDKQKLLRELAEHNKHGYIFAVNLPKDEKENSKTLIGASPELLVSRNGMQVISNPLAGSRPRSEDPVEDKRRAEELLSSPKDLHEHAVVVEAVAAALRPYCHTLHVPEKPSVIHSEAMWHLSTEVKGELKDPNTSSLQLAIALHPTPAVCGTPMEKAREAIQHIEPFDREFFTGMLGWSDLNGDGEWIVTIRCAEVQENTLRLYAGAGVVAESKPEDELAETSAKFQTMLKALGLRDSSLNEK

SEQ ID NO: 93337 - protein, 469 aa, Bacillus aquimaris
  misc_feature (1)..(469): tr|A0A1J6W023|A0A1J6W023_9BACI Isochorismate synthase M enF OS=Bacillus aquimaris OX=189382 GN=menF PE=3 SV=1
MVTIHKTNIEKAFDTAMEKARQYRRPVLFSIVEKIDAVDPLSFYNEGKVLYEGTRFMWKDRDHTITIAGLGAACTISTEEEKDQFFAVEKEWKRFIEYGVILSLENWAGTGPLLFGGFRFDPLNQRGSEWDEFADGTLQVPSIMLTKSKEADYLTVNMLCGSHHDEDSLDKLMRIKDELISKSKFPTVPDETTVSEVEDYKPEEWKTSVQNVVDELRGGSMEKVVLARKCKVSFDAPVTSDFVLDNLWKQQPDSFIFSFERNGSCFIGATPERLVKKTGEEVLSTCLAGSIARGQTIEEDEMLGAELLNDEKNRYEHHLVVENIHQALEPFCSDLSLPEQPGLMKMKDIQHLYTPVTGRASKQTSLLDMVEKLHPTPALGGVPREEALHVIRQEEKMDRGLYAGPSGWLDAYGNGEFAVAIRSGLLQGKESYIYAGCGIVADSDPETEFKETQMKFRPMLRALGGNING

SEQ ID NO: 93338 - protein, 473 aa, Bacillus aryabhattai
  misc_feature (1)..(473): tr|A0A1S2BY46|A0A1S2BY46_9BACI Isochorismate synthase M enF OS=Bacillus aryabhattai OX=412384 GN=menF PE=3 SV=1
MIATTEQLVQEYIKDAIECAKNENQPKLVSLVKKVRPIDPLIFYANGHDQFYKERFFWKDPNSYYTFVGLGYAHTICTNAAKERYFHIENEWKRFIKEDFYKNNQIFPDGTGPLLFGGFSFDPNQYRENYWSDFPSSKFMIPTVLYTQVDKEGYLTVNMMVKGQDSVKEHINYFEEVQKLVRCEEYDGESHISPLLLEKEEIGVEKFKGNVERATTLIKQQAIEKVVLARQLKVKFNEDISTEYVLQRLLKEQPTSYTYILEGENQHFIGASPERLVQKQGDYVFSTCLAGSIPRGKTRQEDHELGEELLQDPKNLIEHDVVVHMIKEAMNSYCYEVEIPSKPSLYKTKHIQHLYTPVKGRIKEDVTLFSFIQKLHPTPALGGYPQQEALPIIRKLESFDRGWYAAPLGWMDINGNGEFIVGIRSAVIQQKEAVLFAGCGIVADSTPESEYEETRIKFNPMLSALGGIMRGTH

SEQ ID NO: 93339 - protein, 469 aa, Bacillus asahii
  misc_feature (1)..(469): tr|A0A3Q9RQG1|A0A3Q9RQG1_9BACI Isochorismate synthase M enF OS=Bacillus asahii OX=228899 GN=menF PE=3 SV=1
MAISEETEQLQGLAFAMQRAKERNESVLFSHVKKIEYKNPLSFYQAGREQYAGERFFWQDPAKEITITGLGNIKKLQATASANRYKQVEKCWLKLQNAAVQSGVRDVDATGPLLFGGFSFDYEQSSSLLWNQFGDNLFYIPAYMLSIVKGEAYLTTNILCSPEDQEQLFIHMINEREEFLVERLENKEVPTNALVEQREIRPTEWKQTVAKAVDEMRRSDLDKIVLARELRVVFQDRIVSEKVLETLMVEQPTSYIFSFEAGGDCFIGATPEQLIKKKGNEVFSVCLAGSIARGKSEEEDTRLGNELLHDSKNRMEHQYVVSMITNALQTLCEEIIVPDEPELMKIRHIQHLYTPVKGMCVGDATIFDFVEKLHPTPAMGGLPKEKAIVRIREIEGLERGLYAGPLGWVDSYGNGEFAVGIRSALLQGNEASLFAGCGVLEDSLPESEYQETGIKFNPMLSALGGHLHD

SEQ ID NO: 93340 - protein, 415 aa, Bacillus atrophaeus
  misc_feature (1)..(415): tr|A0A0H3E797|A0A0H3E797_BACA1 Isochorismate synthase D hbC OS=Bacillus atrophaeus (strain 1942) OX=720555 GN=B ATR1942_13815 PE=4 SV=1
MSEQHVISEEKAEQLLSQYRAGSFFLSTPHRTLLAEGAFAEVPNRDGHEDQLKDLPGRIAAVLNEAKECGHSNPAVVGAIPFDYTKPAKLIVPTNIRWSGPLQLDPAGRHQQPPENTYEMQPVPEPAEYMRGVERGLERIEAGDLSKIVLSRSLQLTSPKPIHIESLLHHLAQHNTNGYTFAADVSKQETDSADLGASPSRRTLIGASPELLVSRSGTQVVSNPLAGSRPRSEDPVEDQRRAAELLSSAKDLHEHEVVADAVAAALRPFCRTLDVPAEPSLVQTETMWHLSSEIRGELSDPSTSALELAIALHPTPAVCGTPTDSAREAIKEIEPFDRGFFTGMVGWCDSEGDGDWVVTIRCAEAEDYALRLFAGAGVVKGSKAEDELAETSAKFRTMLLAMGLKNDLLKSLLEG

SEQ ID NO: 93341 - protein, 393 aa, Bacillus australimaris
  misc_feature (1)..(393): tr|A0A0P7FY26|A0A0P7FY26_9BACI Isochorismate synthase O S=Bacillus australimaris OX=1326968 GN=AKG37_09180 PE=4 SV=1
MKHSLLSSEEKVQLLQDYQPGAFFLASPKRTILAEGIFKHIETNQLNELSTKVAHVFDAAKQAGIQAPIVAGAVPFDPVQPVRLNVPVHVQFSDPLEFQQADEEPEEVSPSYEVTPVPAPDVYMEGVNEGLAKIESGELSKIVLSRSLHLKSNQEIHTKAILERLARHNTTGYTFATNVADPASSEKRTLLGASPELLLSKTGSSVISNPLAGSRPRSSDPVEDKRRHDELLTSAKDLHEHAVVVEAVTKALAPYCHTLDVPASPSVIQTETMWHLSTVVKGELADPNVSSIDIALSLHPTPAVCGTPTADAREAIQAIEPFDRGFFTGMIGWADENGDGDWIVTIRCAEAEGQSLRLFAGAGVVKGSKAEEELAETSAKFNTMLHAMGIHQR

SEQ ID NO: 93342 - protein, 467 aa, Bacillus azotoformans
  misc_feature (1)..(467): tr|A0A072NJW4|A0A072NJW4_BACAZ Isochorismate synthase f amily protein OS=Bacillus azotoformans MEV2011 OX=13489 73 GN=M670_03131 PE=4 SV=1
MVTIQQSTLHKKIAYGVEQAKSLSHSILVSASTKVDLIIDPVTFYEKGKNRTGKRTFWSTPSGDFVMVGIGNAYTFESNGGNNFEQVEKEWIELNENSVMEPKERVPGVGPVILGAFSFDPRKEKTKLWDSFPVSKMMLPQHLLTITRNEFWLTVNVIVQADTNVDEMAELLLTEQKNLCKDAYIPYKCSIGKEFIIEEVTKDEWIASVDTVAGQIRDKKIEKVVLAREIRVKSDFPFITEDILDRLRKEQPSSYIFALESGQDCFIGASPERLIKKEGAEAFTTCLAGSTARGTSEEEDARLGNELLQDQKNLHEHEVVVRAIRSAFEQGCDRVVIPEKPTLYKVRDIQHLYTPIVGKVKDTVSLLTLVEKLHPTPALGGYPREEALRKIREIEDLDRGLYAGPIGWLDSSGDGEFAVGIRSGLLQGKEASLFAGCGIVGNSDPISEYKETQMKFKPMLSALGGSF

SEQ ID NO: 93343 - protein, 464 aa, Bacillus bacterium
  misc_feature (1)..(464): tr|A0A506QC53|A0A506QC53_9BACI Isochorismate synthase O S=Bacillus bacterium OX=2053512 GN=FJ659_09290 PE=4 SV= 1
MIQTKQIGLQEVLSAAIKRATDEKILVSFVKQIDWMDPLLFYAAGKRIPFENRYYFADPAQHVIFAGIGSVFTIATSSHKRFQTTRDEWDKVKGKAFVQREKYEFGTGPLLFGGFSFDQEKEKTDLWKEFDDTTFSLPAFLLTVKNEKAWLTMNTFVSATDCAETLYNEIVSLEEKIFEESACALEGSKLTVTSKVEVDPKGWMKAIEKVQDEMKQGNVQKVVLARELKVEMNHHIDSALVLEALRIGQPDCYVFSFDYKGACFLGATPERLIRKEDEKFTSMCLAGSTGHGQSIEESKRNSNALLHDEKNLAEHGYVVNMIRSVLNEHCESVNIPESPGLLTTKNLIHLYTPVEAKGDASLLTMVEELHPTPALGGTPRLEAMKLIRDVELLDRGLYGAPIGWIDDEGNGEFAVALRCGLLNGEKASLFAGCGIVIDSVPQLEYEETSLKFRPMLGALEELMK

SEQ ID NO: 93344 - protein, 471 aa, Bacillus badius
  misc_feature (1)..(471): tr|A0A0C2Y7B7|A0A0C2Y7B7_BACBA Isochorismate synthase M enF OS=Bacillus badius OX=1455 GN=menF PE=3 SV=1
MSTIKSQPIKEAFVQSILEKQHNKRTSLFSYVEKIDWIDSLQFYQSGRALYAGERFFWKDRDGEVEIVGLGNIYTIRNEKTDRSRYAETEEKWNDMIKCSFIHNSFDAYGVGPVLFGGFSFDPKQEQEEEWSKFSSAFFYLPEYMLTIYEGECYLTTNVICPSDELEELIDKLESKKDWLLTQASAQQPDEHKQFAYIKEQNTEQWKKAVNEAVKQIRSDDELKKVVLARKIVAGFNQEIDQDNVLERLMKQQPDSFVFSLEAMESCFLGASPERLVRKRNDIALSTCLAGSIKRGRTDEEDDALGKELLDDEKNRIEHDYVVQMIKREMEALCQTVNIPSAPGLMKVRDIQHLYTPVTGITDEGRSILQFVERLHPTPALGGLPNDKALPVIRRLEEMDRGFYAGPVGWMDYRKNGEFAVAIRSGLLSKQQAFLYAGCGIVADSEAESELAETRIKFRPMLRALGEMADE

SEQ ID NO: 93345 - protein, 399 aa, Bacillus bombysepticus
  misc_feature (1)..(399): tr|A0A023P755|A0A023P755_9BACI Isochorismate synthase O S=Bacillus bombysepticus str. Wang OX=1330043 GN=CY96_1 0640 PE=4 SV=1
MNEHIAVKELSEKLLEDYKTESSFFFASPTRTILAEGEFTTVKHREIESFPELVQATLSNAKQAGNPNPIVVGALPFDRRKEVQLIVPEYSRISERLQLDTTNQLETNENVTFEMTPVPDPEVYMNGVKQGIEKIQDGDLKKIVLSRSLDVKSSEKIDKQKLLRELAEHNKHGYTFAVNLPKDEKENSKTLIGASPELLVSRNGMQVISNPLAGSRPRSEDPVEDKRRAEELLSSPKDLHEHAVVVEAVAAALRPYCHTLHVPEKPSVIHSEAMWHLSTEVKGELKDPNTSSLQLAIALHPTPAVCGTPMEKAREAIQHIEPFDREFFTGMLGWSDLNGDGEWIVTIRCAEVQENTLRLYAGAGVVAESKPEDELAETSAKFQTMLKALGLRDSSLNEK

SEQ ID NO: 93346 - protein, 468 aa, Bacillus boroniphilus
  misc_feature (1)..(468): tr|W4RNX3|W4RNX3_9BACI Isochorismate synthase MenF OS=B acillus boroniphilus JCM 21738 OX=1294265 GN=menF PE=3 SV=1
MVAIQETELRQGILDAIERAKGQSQSVLVSEVHNLDCIDPFYFFASGREKFFGERFFWKDPEGDHFLTGLGICGQIQSDQGADRFFHVEKEWKRFKDTALVFNKHNVNGTGPSIFGGFTFDPLKKKTGLWSKFSEALFHIPKYMLTIVKGEAYLTTNVVCTQHDDMSLFDKVTREREEVLSKGGQKPVLARLDLKDIIEIDPEAWKKTVTDVVDGFENSELKKVVLARELRLHFTDEVQSESVLADLLENQQASFTFAFESNGDCFIGASPERLVKKDGASLFSACLAGSIARGSTPEEDENLGEELLTDEKNLIEHQYVVDMIKGAMEETCDEVLLPEQPVLMKMKYIQHLYTPVIGKNREGTSLLHLVNRLHPTPALGGLPKQAAIVKIREIEQLDRGLYAAPVGWMDYQGNGEFAVAIRSGLIQGNEASLFAGCGIVADSNAESEYKETSIKFRPMLAALGGKIT

SEQ ID NO: 93347 - protein, 469 aa, Bacillus butanolivorans
  misc_feature (1)..(469): tr|A0A2A7WG51|A0A2A7WG51_9BACI Isochorismate synthase M enF OS=Bacillus butanolivorans OX=421767 GN=menF PE=3 S V=1
MAISEETEQFQGLASAIQKAKDLNGQVLFSHIKKINCNNPLSFYQAGRERYAGERFFWEDPAKDITITGLGNVKKLQAASNADRYREVEMSWIKLQNAAVKTGVTDVEATGPLLFGGFSFDYETNSTLLWNQFGDNLFYIPAFMLSLVGEQAYLTTNLLCSPDDSEKLFIDMINERESFLIESLNGTELRANTLVKQKEVKPKEWKQTVAEAVEEIKTTDLDKIVLARELRLVFERSIDSEKVLEQLIAEQPLSYIFSLEAGGDCFVGATPERLIKKQGNEVFSTCLAGSMGRGKTEEEDACLGNELLHDQKNLQEHQYVVSMISNAFEAVCEKVIVPTEPKLMKNRHIQHLYTPVRGICNEGVTIFEFVENLHPTPAMGGLPKEEAVARIREIEGLERGFYAGPLGWVDAYGNGEFAVGIRSALLQDNEASLFAGCGVVEDSTPESEFQETGIKFNPMLSALGGNLNE

SEQ ID NO: 93348 - protein, 458 aa, Bacillus caldolyticus
  misc_feature (1)..(458): tr|A0A2H5KJY4|A0A2H5KJY4_BACCL Isochorismate synthase M enF OS=Bacillus caldolyticus OX=1394 GN=menF PE=3 SV=1
MAIGFRHHLQQQLHRLAVNAGRPFVSWAEPWEGVDPVSFFMQGPSCGFRERFFWADRTGGTILVGLGSVYAIETEKADSRFDDVEAGRRRWKKEMEPYGAADAPPLLFGGFSFDPYRPGTDMWRGFPAGKLVAPAALLAVRNGKTTLTVTVPTDKRGRDWERVGRLLERISDPMAAPKRLPRLVSDEEEEKERWLAAVREAIASIRAGALDKVVLARARRLAFAKTVDAAAVLQRLREQQPFAYIFAFEQDGRCFIGASPEQLVQKEGKMCRSVCLAGSVRRGADMEEDERLGAWLRADRKNNEEHQFVVQMIGRLFSSVCETVEMPPAPQLLKLPHIQHLCTPVVGRGCRERSVLRLVEMMHPTPALGGTPRDRALEVIRALEPLDRGWYAAPIGWVDGEGNGEWAVAIRSALLAGKEAMLFAGCGIVADSDPNSEYEETNVKMAPMLSALGVMNDG

SEQ ID NO: 93349 - protein, 468 aa, Bacillus campisalis
  misc_feature (1)..(468): tr|A0A0M2SPM7|A0A0M2SPM7_9BACI Isochorismate synthase M enF OS=Bacillus campisalis OX=1408103 GN=menF PE=3 SV=1
MVTIQDTELRQGIVAAIGRAKELSQSVLVSEVQKIDRLDSFHFFAAGRSRFLGERFFWQDPHGTYKLAGVGVVRQIQCDKASGRFVHIEKEWKQFIETAVLAGKQDVPGSGPAMFGGFSFDPLKDKTGLWSKFSQSHFHIPAFMLTVLEDEAYFTTNVVCTQHDDASLFDKISEERQAILAAAVREQEYSLPNLEALREIQPEEWKQSVKDLVESLENSGLKKVVLARELRLQFDQDVAVEGVLQRLTEQQRESFIFAFEANGDCFIGASPERLVKKEGEKVFSACVAGSIPRGKTPEEDRQLGKVLLEDQKNLIEHQYVVEMIKEAMQETCDRVVLPDGPKLMKMKYIQHLYTPVTGENRAGTSILDLVDRLHPTPALGGLPKEKAVEKIREIEILDRGLYASPIGWLDHLGNGEFAVAIRSALIQASEASLFAGCGIVADSDAESEYTETSIKFRPMLAALGGIKQ

SEQ ID NO: 93350 - protein, 468 aa, Bacillus canaveralius
  misc_feature (1)..(468): tr|A0A2N5GPF3|A0A2N5GPF3_9BACI Isochorismate synthase M enF OS=Bacillus canaveralius OX=1403243 GN=menF PE=3 SV =1
MVTIQDTELKEGISEAIDRARRLAKPVLVSEVHKLGHIDPLDYFAAGREQYLGERFFWKDPSGQTLIIGLGICKQIQSDQADDRVLQTEKEWKRFIEGSVIYNPYPQPGLGPVMFGGFSFDPLKQKTLLWSKFSDSLFHIPKYMLSIIDGQSYLTTNVVCTQHDDASLAEKVAANRQELLSSAAKTAHYDSAKLLHKEEIDPGDWKNTVSNVVADLQEGSLKKVVLARELRLYFKEAVQVEMVLSRLLKEQRESFIFAFESNGDCFIGASPERLVKKAANQVKSTCLAGSIARGKTLEEDKLLGKTLLTDQKNLIEHQYVVDMIKEAMADACEHVDMPNEPQLLKMRDIQHLYTPVTGRLFQNKTLLSLVKRLHPTPALGGSPKYEALAKIREVEAMDRGFYAAPLGWVDYHDNGEFAVSIRSGLIQGEEASLFAGCGIVADSNAESEYLETGIKFRPMLTALGGRME

SEQ ID NO: 93351 - protein, 476 aa, Bacillus cavernae
  misc_feature (1)..(476): tr|A0A3S0U6H0|A0A3S0U6H0_9BACI Isochorismate synthase M enF OS=Bacillus cavernae OX=1674310 GN=menF PE=3 SV=1
MERIGGFFLAISHETELIEGLKAALDEAKRKKHKILFSEVVEVDNISPLSFYQVGREQYIGERFFWQDPNKDIIIAGLGKVEKIQVSAADSRFMEVEASWTALIENAVKTGILEKEGTGPLLFGGFSFDHNKSNSLLWDQFGDNLFYIPAFMLSIVKGQAYLTTNLICSPEDHVQLFIKMINERDTLLSGSVNFGNGHHEIIEQREIAPEHWKYTVANTIEEIKGTDLKKLVLAREMRLIFNHSVLSEQVLQKLAVEQQTSFVFSLETGSDCFIGASPERLIKKTGNEMFSTCLAGSIARGKTKQEDDRLGYELLHDQKNLVEHQYVVSMIGEAMKSVCSSVNIPKAPALMKNRHIQHLYTPVKGMCNRFVSIFEMIEKLHPTPALGGLPKEKAVRRIREVEQLERGFYSGPIGWTDSYGNGEFAVAIRSALLQGKEASLFAGCGIVEDSTPEGEYNETSIKFKPMLSALGGNLHE

SEQ ID NO: 93352 - protein, 464 aa, Bacillus cereus
  misc_feature (1)..(464): tr|A0A5B7VND0|A0A5B7VND0_BACCR Isochorismate synthase O S=Bacillus cereus (strain ATCC 14579 / DSM 31 / JCM 215 2 / NBRC 15305 / NCIMB 9373 / NRRL B-3711) OX=226900 GN =EJ379_24805 PE=4 SV=1
MIQTKQKGLQEVLIAAIKRATNEKTLVSFVKQIDWVDPLLFYAAGKRISFENRCYFADPAQHVIFAGIGSVFTIANSSHKRFQTARDEWEKVKENAFVQRDEYEFGTGPLLFGGFSFDPEKEKTDLWKEFKDTTFSLPAFLLTVKNEKAWLTMNTFVSATDCAETLSNEMISLEEKILGESRCALNGSKLTVISKVEVDPKGWMKAIEKVQDEMKQGNVQKVVLARELKVEMNHSIDSALVLEALRIGQPDCYVFSFDYKGACFLGATPERLIRKEDEKFTSMCLAGSIGHGHSIEESKRNSNALLHDEKNLAEHGYVVNMIRSVLNEHCEYVNIPESPGLLTTKNLIHLYTPVEAKGDASLLTMVEELHPTPALGGTPRLEAMKLIRDVELLDRGLYGAPIGWIDDEGNGEFAVALRCGLLNGEKASLFAGCGIVIDSIPQLEYEETSLKFRPMLGALEELMK

SEQ ID NO: 93353 - protein, 458 aa, Bacillus circulans
  misc_feature (1)..(458): tr|A0A553SJP2|A0A553SJP2_BACCI Isochorismate synthase O S=Bacillus circulans OX=1397 GN=CEQ21_17290 PE=4 SV=1
MKESKGLLLEGSELNTSTSILRSKVIKLEQKQDFITIFAQNDQYKGKRFFWKSPDGASVFAGIGICKMLQSNGMEQIYEAIEKEWQELLDGSEINNPFQTAGVGPMLFGGFSFDPKKTRTHLWDNFKDAHFYLPAIMFSEIDGEQYVTVNQYGNGNDLVEAIQACFEELEKSGDTSAVNTSANKLLDSKEINGEQWKMMVTEVVEDLGQSLKKVVLARESRLVFEQDIKTETVLENLLNRQKNSYVFALESDKDCFIGASPERLVKKAGKQVFSVCLAGSIARGMNEEEDYSLGQELMNDPKNRVEHDYVVQMIRSAMEKVCSTFDIPNEPRLLKMRDIQHLFTPVTGTLKKSASVLALIKLLHPTPALGGYPQALAIEKIREAEMLDRGLYGAPIGWLDYRGNGEFAVSIRSALIQKNEASLFAGCGVVKDSDAEMEFKETAIKFKPMLSALGGHLG

SEQ ID NO: 93354 - protein, 443 aa, Bacillus coagulans
  misc_feature (1)..(443): tr|A0A150JQ44|A0A150JQ44_BACCO Menaquinone-specific iso chorismate synthase OS=Bacillus coagulans OX=1398 GN=B4 099_2530 PE=4 SV=1
MKEKTAPALKLASRIIKCRTAPDPLRLFTAGAARFYGSRFFWQDKNRETVFVGFGRVWSCTVTASDGFAQMEDEWRNLKGAGEVYPETAETGTGPVLFGGFAFDGTVAKQEWKTFGQGIFRVPQILFTFKKDAVFLTVNGCGGTESVQEAEKTARSLLNGSTAFPALPPLKAVQEMGADEWKKSVATAVQFIREGRMDKVVLARKLELAFDGVTSPDAVLAALSAQQNDSYLFVLEEGSESFIGASPERLVKKTGQHILSTCLAGSIKRGRNEAEDLELGKALLSDQKNLSEHGFVVSMIRQVLEPFCNGLNVPGAPVLMRMRDIQHLYTPVTGTVKDKNTTLFQLVKALHPTPALGGIPRQPAMEAIRLLEKMDRGLYGAPIGWVDYRGSGEFCVGIRSGLLKGDYASLYAGCGVVKESEPEEEYKETSVKFTPMLRALGGK

SEQ ID NO: 93355 - protein, 466 aa, Bacillus cohnii
  misc_feature (1)..(466): tr|A0A223KUH2|A0A223KUH2_9BACI Isochorismate synthase M enF OS=Bacillus cohnii OX=33932 GN=menF PE=3 SV=1
MVTLQKSKWKHFWNGWDSLNRSKEVLYSYTKKISEINPLQFFHNGSANFKGQRFFWTNRARNEMIVGLGITLQFSSNENGKERYLEIEKRWKQIVANSFCHSPNSHIGPYMFGGFSFDPKRERTPLWEKFAHTEFVLPTVMLTIKDDEAFLTYNFFTDTSKEKVNQTLLLEEALLKDGTHSYGSSELSSFLEMDPIEWKQSIEEVKRRIVAGHMDKVVLARELRTKFLDSINVESVLSILLEEQPSCYVFAFEREDNCFIGASPEQLVQKESEIVKSMCLAGSIARGKTIAEDENLGDTLLSDSKNLQEHDFVVQMISNSLKAVCQQVTTGDRPKLYKLKHIQHLFTSVIGELKDDVSIFQLIERLHPTPALGGYPKEISLETIREVEVLDRGWYAGPIGWMNLKGDGEFAVAIRSALLQEKEASLFAGCGIVENSDPESEYEETRIKFKPMLSALGGIRHHDSNE

SEQ ID NO: 93356 - protein, 403 aa, Bacillus cytotoxicus
  misc_feature (1)..(403): tr|A0A2S1AAC9|A0A2S1AAC9_9BACI Isochorismate synthase O S=Bacillus cytotoxicus OX=580165 GN=CG477_009955 PE=4 S V=1
MNHTATLNELATSLLRDYKAGSSFFFTSPYRTMLAEGTFATVKHSQAKNFPEIVQSVLKSAKQAGHQNPIVVGALPFDRTKTMQLIVPQETRVTDRLQWDVGEQTQDSSSVHKFKMKPIPMPSEYMRGVEQGIAKIKSGDLKKIVLSRLLDVYSSREIDVQKLLYDLAKHNPHGYTFAVDLPNNEDDTKQKRTRTLIGASPELLVSRRGMQVISNPLAGSRPRSGDPAEDKRRAEELLSSEKDLHEHAVVVEAVAAALRPYCRTLHVPEKPSLIHSETMWHLSTEVKGTLLDESISALELASALHPTPAVCGTPTEKAREAIQEIEPFDREFFTGMLGWSDINGDGEWIVTIRCAEVEENSLRLYAGAGIVAESKPEDELAETSAKFRTMLQAMGLNEDSLEG

SEQ ID NO: 93357 - protein, 467 aa, Bacillus deserti
  misc_feature (1)..(467): tr|A0A2N5M4N4|A0A2N5M4N4_9BACI Isochorismate synthase M enF OS=Bacillus deserti OX=673318 GN=menF PE=3 SV=1
MNIMENLHKARVAAKETNSSVLFSEVTKIGMLDPLSFYQSGNESYTGDRFFWQDPKKETVLVGIGKIDVFQSSHNQNRYNTIEQRWEKLIDHACIIKNQDVPGTGPLLFGGFSFDSAKNSSLLWDQFGDHLFYIPKYLLSIIDGQAYLTINALIDHEDDLSLLTESDKEKDELLEKALNYVEQPAAQNELLEQIEVCPEEWKDTVQSAINEIRTTDLDKIVLARETRLRFQSDISPAPVLNRLAREQPTSFIFCYESGSDYFIGASPEQLVKKNGTTLSSACLAGSIARGKTAEEDDLLGKTLLHDQKNLIEHQYVVSMIKHAMETICRKVSVPDGPELMKTKHIQHLYTPVSGECTEDISIFDCVEKLHPTPAMGGLPKEKAVERIRELEILERGFYASPIGWTDGKGNGEFAVAIRSALVQGNEASLFAGCGIVEDSEPESEYIETAIKFKPMLSALGGNLHATS

SEQ ID NO: 93358 - protein, 487 aa, Bacillus enclensis
  misc_feature (1)..(487): tr|A0A1C4AIZ3|A0A1C4AIZ3_9BACI Isochorismate synthase M enF OS=Bacillus enclensis OX=1402860 GN=menF PE=3 SV=1
MYLIISFDHVRDCLGEFGLVTIHKTNIEKAFDTAMEKARQYRRPVLFSIVEKIDAVDPLSFYNEGKALYEGTRFMWKDRDHTITIAGLGAACTISTDEEREQFFAVEKEWKRFIEDGVILSRENWAGTGPLLFGGFRFDPLNQRGSEWDEFADGTLQVPSIMLTKSKEADYLTVNMLCGSNHDEDSLDKLIRIKDELLSKSKFPIVSDDTTVSGVEDYNPEEWKTSVQNVVDELKGGSMEKVVLARKCKVSFEAPVTSDFVLDNLWKQQPDSFIFSFERNGSCFIGATPERLVKKTGEEVLSTCLAGSIARGQSIEEDEMLGAALLKDEKNRYEHHLVVENIQQALEPFCSDLSLPEQPGLMKMKDIQHLYTPVTGRASKQTSLLDMVEKLHPTPALGGVPREEALHVIRQEEKMDRGLYAGPSGWLDAYGNGEFAVAIRSGLLQGKESYLYAGCGIVADSDPETEFKETQMKFRPMLRALGGNING

SEQ ID NO: 93359 - protein, 467 aa, Bacillus endophyticus
  misc_feature (1)..(467): tr|A0A329EJQ4|A0A329EJQ4_9BACI Isochorismate synthase M enF OS=Bacillus endophyticus OX=135735 GN=menF PE=3 SV= 1
MVTSIEEAKRKIEDASLRANKLEKPQFVSIVKQIAQFDPLSVYYNGRHLYEGKRFFWKDAYEPFYLVGFDYAHIIEKNKGRDRFKYVEEEWKRFIEGVKENKTPFGTGNLLFGGFSFHPYQKEDNLWTSFPVSRFYVPKVLFTSYNNEAFITFNRYIKQGESVEDIIKEMEHIEETFLASDILPSQVYERNAVQHEVAPEEWKRAVKHATEQIRSGEIEKVVLARELQITFHEKIWSEYALSRLLEEQNLSYIFAVEQDSQCFIGASPERLVKSVDGEVFSTCLAGSIPRGHSAEEDENLGEELLNDEKNLFEHKLVVNMIEKAMKETCLNVYAPEHPTLYKVKHIQHLYTPIKGKAKEGTTLFELVEKLHPTPALGGYPKEESVEVLEKLEVFERGWYAAPIGWLDGDGNGEFIVGIRSALLRGHEASLFAGCGIVGDSDPQSEYEETKTKFKPMLSALGGMNNDK

SEQ ID NO: 93360 - protein, 466 aa, Bacillus endozanthoxylicus
  misc_feature (1)..(466): tr|A0A5J5GXC3|A0A5J5GXC3_9BACI Isochorismate synthase O S=Bacillus endozanthoxylicus OX=2036016 GN=F4V44_25275 PE=4 SV=1
MVTIQRTELKEGIQAAIEKAKKNSASVLVSEVQKIDSCLPLSFFAAGKEKYGGERFFWKHPSEERYMIGLGICKEIASDQATDRFFHVEKEWGSFISQAIIYDDEHVQGTGPTAFGGFSFDPHKEKTMLWSNYASSLFHIPRFMLSITDGHTYLTTNVVCTNECDSSYYMEIENERQELLAQTREHVKLELVSLVDRLEVKPEAWKQSVTQVVEGLKQGPLKKVVLARELRLIFNGEIQSETVLNRLLEEQKDSYVFAFESHGDCFIGASPERLVKKNHDQVFSTCLAGSIARGKSEAEDELLGNSLLKDDKNLIEHQYVVDMIKEAIEDTCTKVTIPSHPQLLKLKHIQHLYTPVIGKADEHTSLLALVEKLHPTPALGGLPKEPAVAKIREVEDLDRGFFAGPIGWMDYQGNGEFAVAIRSGLIQGNEASIFAGCGLVGDSRAESEYEETNMKFKPMLSALGGI

SEQ ID NO: 93361 - protein, 512 aa, Bacillus filamentosus
  misc_feature (1)..(512): tr|A0A3A5J0E1|A0A3A5J0E1_9BACI Isochorismate synthase M enF OS=Bacillus filamentosus OX=1402861 GN=menF PE=3 SV =1
MYFKIRFFSLLQLSIFKRRFYHIGFPEINWEIKIRLCQILLEGASVITSIEEAKRKIEDASLRANKLEKPQFVSIVKQIAQFDPLSVYYNGRHLYEGKRFFWKDAYDPFYLVGFDYAHIIEKNKGRDRFKYVEEEWKRFIKSVEDNKTPFGTGNLLFGGFSFHPYQKEDNLWTSFPVSRFFVPKVLFTSYNKEAFLTFNRYIKQGESVEDIIKEMEHIEETFLASDTLPSQVHNRDAVQHEVAPEEWKRAVKHATEQIRSGEIEKVVLARELQVTFHEKIWSEYALSSLLEEQNLSYIFAVEQDSQCFIGASPERLVKSVDGEVFSTCLAGSIPRGHSAEEDEKLGEELLNDEKNLFEHNLVVNMIEKAMKETCLNVYAPEHPTLYKVKHIQHLYTPIRGKAKEGTTLIELVEKLHPTPALGGYPKEESIEVLEKLEVFERGWYAAPIGWLDGDGNGEFIVGIRSALLRGHEASLFAGCGIVADSDPQSEYEETKTKFKPMLSALGGMNNDK

SEQ ID NO: 93362 - protein, 469 aa, Bacillus firmus
  misc_feature (1)..(469): tr|W7LF93|W7LF93_BACFI Isochorismate synthase MenF OS=B acillus firmus DS1 OX=1307436 GN=menF PE=3 SV=1
MVTIQDTELKEGIHEAIERAKALSKPVLVSEVKKINHIEPLSFYAAGKSRFFGERFFWKDPSGEAYIIGLGICRQIQSDESTGRFDHVEKEWKRFINNSIIFNPYNENATGPVMFGGFSFDPLKQKTKLWSKYSNSLFHVPAYMYSEINGQAFLTTNVVCTQHDSESLFEKIAAERSMLIGSINDYHPESANTLQEEADINPEKWMETVDEIVDELKTGSLLKKVVLARESRLIYEKPIEIERVLQNLMKMQSESFIFAFESNGDCFIGASPERLIKKYGESVFTTCLAGSIPRGKTEEDDHILGEALLHDQKNLTEHQYVVDMIKEAMEESCTEVELPNEPQLMKMRDIQHLYTPVIGKTREDASLLALVDRLHPTPALGGLPKREAVEKIREAEELDRGFYAAPLGWMDFRGNGEYAVAIRSGLIQGNEASLFAGCGVVQDSNAESEYQETKIKFRPMLTALGGYEK

SEQ ID NO: 93363 - protein, 473 aa, Bacillus flexus
  misc_feature (1)..(473): tr|A0A4P8X595|A0A4P8X595_9BACI Isochorismate synthase M enF OS=Bacillus flexus OX=86664 GN=menF PE=3 SV=1
MIAITEQLIHDHLSKAIECARNESNTKLVSVVKKVRPIDPLIFYANGYRQFCKERFFWRDPNQQYTFVGLGRAYTLSSKEGSARFFDTEKQWKRFKKDILYTNNVEFPNGTGPLLFGGFSFDPYQKKDSYWTDFSNSKFVIPSVLYTEADGNGYLSINIKVSGEDNIQDHLKHIEELEGLLINQEYDGSSYSSPLLLTKEEIDVQRFTKNVQNATSLIQQEKIEKVVLARQLKATFTEAISTEYVIQRLLREQPTSYTFIFENENQHFVGASPERLVQKEGDYVFSTCLAGSIKRGKTRKEDALLGDELLNDQKNLIEHDVVVHMIKEAMDAYCMEVEIPMQPTLYKTKHIQHLYTPVRGKIKKGVTLFSLLKELHPTPALGGYPQKESLSIIRKLEPFDRGWYAAPIGWIDINGNGEFIVGIRSGVIERQQAMLFAGCGIVADSTPESEYEETTIKFNPMLSALGGIASGPY

SEQ ID NO: 93364 - protein, 473 aa, Bacillus foraminis
  misc_feature (1)..(473): tr|A0A4R2BBN1|A0A4R2BBN1_9BACI Isochorismate synthase M enF OS=Bacillus foraminis OX=279826 GN=menF PE=3 SV=1
MGGINLVTIQDTELRKGIIAAIDRAKELSQSVLVSEIQRIEYFKAFNFFAAGRSRFLGERFYWEDPDGTMALAGLGVTRQIHADSAPDRFNHTESEWKRFIETAIIVGDQTATGTGPAMFGGFSFDPLKEKTGLWSKFSDSLFHIPKYMLTVKGGQAFLTTNVVCTQHDDDSLFEKVNQERLSVFTSAYDDGRYRSAELKKVEEKNPEKWKETVSRLVASLKDSHLKKVVLAREIRLFFNQEIEIEKVLSHLVVEQRGSFLFAFEANGDCFIGASPERLVKKEGDEVFSTCLAGSIARGGTPEEDRMLGKALLEDQKNLNEHQYVVEMISEAMLETCEKVKIPNSPKLMKMKYIQHLYTPVVGKSRAETSLLHLVDRLHPTPALGGLPKQDAIEKIREIEDLDRGFYAAPIGWMDYKANGEFAVAIRSALVQGKEASLFAGCGVLADSNAESEFNETSIKFRPMLTALGGKEK

SEQ ID NO: 93365 - protein, 464 aa, Bacillus fortis
  misc_feature (1)..(464): tr|A0A443ILP7|A0A443ILP7_9BACI Isochorismate synthase O S=Bacillus fortis OX=254758 GN=D4N35_015040 PE=4 SV=1
MLMNSPFQTKYINTLKHKTESNKVLASYTKKVDKIDPFAFYQINRPPDEGERFFWKSPDDDMTIVGVGLLRSFSNSGADDRFSRIETEWNDILSSAVIDNPFHVPGTGPLLFGGFSFDPYSLKEEKWQPFGDALFYLPEYMLTVIGDDYYLTVNLFESDELSNQTNKVEKTFDLLIKNEEPSQVPAPHLESREELYVPEWLDSVAEVVNVLRTSEIVKKVVLSREMMLNFSEPVSSEYVLKQLHTQQKDSFIFLLETPDGSFAGASPERLVKKMNDQVLSTSLAGSIGRSEDSKEDRELGNILLNDEKNLYEHHLVVDMIKKALEPYCRELQVPDDPVLLRTPYIQHLYTPVSGVAKSGTSIFHIVGELHPTPALGGVPTGQSMKIIRDKEKMDRGFYASPIGWTDFDGNGEFIVAIRSGLLKGKQAFLYAGCGLVADSDPKEELKETGIKFRPMLQAMGGKSE

SEQ ID NO: 93366 - protein, 464 aa, Bacillus freudenreichii
  misc_feature (1)..(464): tr|A0A448FF54|A0A448FF54_9BACI Menaquinone-specific iso chorismate synthase OS=Bacillus freudenreichii OX=17835 01 GN=menF PE=4 SV=1
MINSPYQTKQINTLKHKDAKSNKVLVSYTKKVKKVDPVAFYQINKPDYDGERFFWTSPDDHTAIVGVGHLHSFFNRRADDRFSQIEAEWNELLASSDINNPFQAPGTGPLLFGGFSFDPYSVKEEKWEPFGDALFYLPEYMLTISGEDCYLTVNLFENEEMAPYSNQMEKSFDLLINNVKRSEISLPNLVNKEELSVPEWLKSVSEVIDELKTSGTVDKVVLSRELKLSFSEPLLTDYVLEQLNTQQQDSFIFMLETSDGSFAGASPERLVKKMNDQVLSTSLAGSIGRSDNPKRDKELGNMLLNDEKNLFEHALVVEMIKKALQPYCEDLDIPNEPVLLKTPYIQHLYTPVCGVSKPGTSIFHLVGELHPTPALGGVPTDRAMKIIRDKEKMDRGFYASPIGWTDFQGNGEFIVAIRSGLLKGKQSYLYAGCGLVADSDPSDELKETSIKFQPMLQAIGGKSE

SEQ ID NO: 93367 - protein, 404 aa, Bacillus gaemokensis
  misc_feature (1)..(404): tr|A0A073K9N5|A0A073K9N5_9BACI Isochorismate synthase O S=Bacillus gaemokensis OX=574375 GN=BAGA_04510 PE=4 SV= 1
MNHTTALKELATKLLDDYKAGSSFFFASPYRTILAEGTFATVQHSQAENFPELVHAVLNNAKQAGRPNPIVVGALPFDRTKAVQLVVPQESRFADRLQLDSTDRVQQSPALTYEMKPVPAPSEYMRGVEQGVAKIKSGDLKKIVLSRSLDLKSPEKVDIQKLLRDLAEHNKHGYTFAVDLPKSQEENDDASKQRSRTLIGASPELLVSRSGMQVISNPLAGSRPRSEDPVEDKRRAEELLSSAKDLHEHAVVVEAVATALRPYCRTLHVPEKPSLINSEAMWHLSTEVKGELLDASVSSVELALALHPTPAVCGTPTEKAREAIKEIEPFDREFFTGMLGWSDLNGDGEWIVTIRCAEVEENSLRLFAGAGIVAESKPEDELAETSAKFRTMLRAMGLNDESLK

SEQ ID NO: 93368 - protein, 399 aa, Bacillus ginsengihumi
  misc_feature (1)..(399): tr|A0A0A6VCR2|A0A0A6VCR2_9BACI Isochorismate synthase O S=Bacillus ginsengihumi OX=363870 GN=NG54_09660 PE=4 SV =1
MSNTTRNKTAKEIIHEYEIDSSFFLSTPQRTLLTKGIVTKYPDDDLNNGTGQMLEQIRKMLSNAKLQGMNDPIVVGAIPFDYTKSLQLFVPKEVEKLGPLSFVEEIRKEDLSKIKYEMTPVPERKEYGEYVAKALKKITNHELSKIVLARSLHVKADKKIAIHKLIQSLVAQNSNGYTFAVNLPQSGLRERKRTLLGASPELLVSKSGSYVCSNPLAGSAPRSKDPKEDQRRAEQLLHSSKDRYEHKFVVDAVAQTLKPFCTNLEVPTEPSLIQTETMWHLSTEIRGQLANPSTTALELGLALHPTPAVCGAPTNLAKEAIQEIEAFNRDYYSGMVGWSDADGNGEWIVTIRCAEVEDDLLKLYAGAGIVAGSKADSELAETSAKLRTMLLSMGISSEY

SEQ ID NO: 93369 - protein, 474 aa, Bacillus glycinifermentans
  misc_feature (1)..(474): tr|A0A0J6DZM6|A0A0J6DZM6_9BACI Isochorismate synthase M enF OS=Bacillus glycinifermentans OX=1664069 GN=menF PE =3 SV=1
MVTTVQRTSLREASEALNIVKKVNHAVLISYSRKIKNIDALSFFRSGEEAFAGKRFFWSDPDGEMTLIGFGKELPISTSGKDSGRYREIDQQWAHLKEKAYHFHEGEDLHQAAVGPLLFGGFSFDPLETREQHWDGYPEGAFFVPSAMLTKAGEEAFLTVNKWKSPNEDASNVLAELKAASLHLTNISAFKEDEKAGARIEAKEELHVSEWLDAIRRATSDIKKGAYDKVVLARDILLTFDKPVKLHEVLSRLMSEQKTSYIFAIEENGKSFVGASPERLIKKDGMKVLSTCLAGSIKRGETEQEDRMLGLELLNDEKNLIEHDIVVGMIHQAFLANCSHVKKPAKPGLYKTKNVQHLYTPVVGQMNDQASLFDLIEQLHPTPALGGSPQQKAVEVIRNIEPMSRGWYAAPVGWIDIGGNGEFAVAIRSGLIESNEARLFAGCGIVADSDPLLEYEETQIKLKPMLSAFGGDTL

SEQ ID NO: 93370 - protein, 469 aa, Bacillus gobiensis
  misc_feature (1)..(469): tr|A0A0M5JA77|A0A0M5JA77_9BACI Isochorismate synthase M enF OS=Bacillus gobiensis OX=1441095 GN=menF PE=3 SV=1
MVTVIQHTLLQEASLALNKAKKVNHAILLSYSKQIESIDPLAFFSNGEKQYAGQRFFWSDSNSDLKIIGLGKEVIFQAEDNAENRFRVIHEKWERFKNDSCHIHDGACSDIAAVGPLLFGGFSFDPKEEKAPHWNHFSAGKFFVPALMLTISSSGAFLTANRWTYGEEDAEQALRKLLKSVSSANEAACSTKQRTKLNSIEEKNTREWMNAVRSATEEIKKKNYDKIVLAREVLATYEENIKLDHVIATLLHEQKTSYVYVVEEGAQSFISASPERLIRKEGSNVSSSCIAGSIKRGKTDEEDEQLGRELLSDQKNRMEHQIVVNMINDAFLANCTAVKKPEKPGLYKTKNIQHLYTPITGTINEKASLFDLIHKLHPTPAVGGEPRELALEFIRNVEPMNRGWYAAPVGWIDCKDNGEFIVALRSGLIERNQARLFAGCGIVEDSDPEKEFEETQIKLRPMLSALGGM

SEQ ID NO: 93371 - protein, 471 aa, Bacillus halotolerans
  misc_feature (1)..(471): tr|A0A2S9WM45|A0A2S9WM45_9BACI Isochorismate synthase M enF OS=Bacillus halotolerans OX=260554 GN=menF PE=3 SV= 1
MVTTVQRTFRKEVLHALHKAKEVNHAVLISYSRQIESLDPLSFFNYGAKKYTGNRFFWSEPESELTIVGLGKEAVFQTNQKNDERYREVFEQWERFKKTAFHIYEEEKLQHSAVGPVLFGGFSFDPYEERGTQWDHFSEGDFFVPSLMLTMSADGSFLTVNRWVSGEDDAEAVLEGLKAFASEFVVPDLNQKDQAVMTASQELDKSDWLKAIETATSQIKENQYDKVVLARELLLTFDGPVKMEPVLKTLLTDQQTSYVFAIEQEGKTFVGASPERLIKRDGNTVMSTCLAGSIKRGSDEEEDRRIGLELLNDEKNLLEHDIVVGMIHNAFVSSCSDVEKPDEPVLYKTKSVQHLFTPIVGQLHASASLFDLIEKLHPTPALGGAPQKKAVEVIREIEPMSRGWYAAPVGWIDSQDNGEFAVAIRSGLIEGSTARLFAGCGIVEDSEPQSEYEETQIKLKPMISALGGERR

SEQ ID NO: 93372 - protein, 474 aa, Bacillus haynesii
  misc_feature (1)..(474): tr|A0A1R1RPB8|A0A1R1RPB8_9BACI Isochorismate synthase M enF OS=Bacillus haynesii OX=1925021 GN=menF PE=3 SV=1
MVTTVQRTFLREAPEALNIVKKVNHAVLISYSRKIESIDALSFFINGEEQFAGERFFWSDPDGGLTLVGLGKEVSVSTDLKDAGRYQAVHEKWERLKEKTYHFHEDQSRSQAAVGPLLFGGFSFDPLEDRKQHWNGYQEGAFFIPSAMLTQDGEETFITVNRWKAPEEDVRKVLEEIKGAASQLTKADASRYPEKGHTRYTAKEELDVPEWLEAVRRATDDIKNGKYDKVVLAREILLTFDQPVELHRVLFNLMSEQKTSYIFAIEENGKSFLGASPERLVKKDGENVLSTCLAGSIKRGESEQEDRMLGLELLNDEKNLIEHDIVVNMIHQALLSNCSNIKKPAKPGLYKTKNVQHLYTPIVGKMNAESSLFDLIEKLHPTPALGGAPQQKAIEVIRELEPLSRGWYAAPAGWVDMSGNGEFAVAIRSGLIDSKEARIFAGCGVVADSDPLMEYEETQIKMKPMLSALGGDIR

SEQ ID NO: 93373 - protein, 464 aa, Bacillus horikoshii
  misc_feature (1)..(464): tr|A0A1Y0CR79|A0A1Y0CR79_9BACI Isochorismate synthase M enF OS=Bacillus horikoshii OX=79883 GN=menF PE=3 SV=1
MITIPFHHIVSLWEEAKVKAASINQSVLISYTKKIEQQDPLHFFQKSEQFFEGQRFFWSNPDHSHMMVGAGVTAEFTADGEDDRYHAIETQWKRFIRQAICNEDTHSIGPVMYGGFSFDPKKDKTKLWDQFADALFILPTFMLTKVEGNTYITINYLSDCDESVLKELVMQEEELLNRSSIKHVNTTSIVKCLEMDPMEWKESISKVTEKISDGQMDKVVLARELRVLFQDKVNVTPVLENLMEEQANSYLFTVERGTDCFLGATPEQLVKKQGNKVQSMCLAGSIARGESVEEDAQLGSALLTDEKNMHEHDLVVQMIRASLEKVCENVRTPSEPNLYKMKHIQHLHTPVTAESNDGCSLSGLIKLLHPTPALGGFPQEISLQTIREVERLDRGWYAGPLGWMDWKEDGEFVVAIRSGLLQEREASLFAGCGIVGDSDPESEYQETQIKFRPMLSALGGNLTQ

SEQ ID NO: 93374 - protein, 399 aa, Bacillus horneckiae
  misc_feature (1)..(399): tr|A0A2N0ZC69|A0A2N0ZC69_9BACI Isochorismate synthase O S=Bacillus horneckiae OX=549687 GN=CWS20_20800 PE=4 SV= 1
MAVSIKNKEYQLLDKFNAGDNLLYFPSKCILGKGEAVSLSAEEQSGLSFSERIHTLFRKAEVLGKDEPIIIGALPFNKGNRGMLIVPESVEQQVDMDSKQAGYTASSLSIKNIQSIPFAADYEKAVEKIVSSIQNGELEKAVLGRILQVAAKEELNIPQLIKQLIAENENKFNFALNISDGTERKKTLIGASPELLISKYGKTVVTNPLAGSRPRKADPLEDRQMENELRHSKKDLHEHQFVVHSIEEALRPFCKSLYVPKKPSVISTNTMWHLSTKIVGELKDSSTQSIQLAECLHPTPAICGTPADTAYKKIEMLEPFERDYFTGLIGWSNRNGDGEWAITIRCAEIENNLISLFAGAGIVEDSVPQEETAETAAKFRTMLSALGIKNIEEEGHKQC

SEQ ID NO: 93375 - protein, 476 aa, Bacillus hwajinpoensis
  misc_feature (1)..(476): tr|A0A4V5Q2T5|A0A4V5Q2T5_9BACI Isochorismate synthase M enF OS=Bacillus hwajinpoensis OX=208199 GN=menF PE=3 SV =1
MEESWGEKTVSTLQHQELYSLLHQGIRKAEKRGTSVLVSQVLSVAAVDPLSFYAAGPNKYENDRTFWSDPENDTTIVGLGSVKQFQAYRDRFRTIENEWQSFLQHSVVEGAPSRPGVGPVLLGGFAFDPTAPESGDWERFPEGGMVLPELMLTSAGSQGWLTINAIVCGDDDSDAMAEELLEKHHGILAHSSTDISPKIDAISIEEIRPEDWKETVRSAAANIRKGKLEKVVLAREIKLQSSNSFSSSRTLMNLKNQQSDSYLFAFEYGKKCFLGASPERLVKREGQQVYSTCLAGSIQRGETPEKDYELGHILLNDHKNRIEHDLVVQMIRKAMEEECDFVQVPSKPELLKTPHIQHLFTPVVARAGEGTSLLRMVERLHPTPALGGYPQEEAVEEIKRIENLDRGWYAGPVGWIDYQGNGEFAVAIRSGLLDGDQATLYAGCGIVADSDPESEYEETKMKFKPMLTALGGNQYD

SEQ ID NO: 93376 - protein, 473 aa, Bacillus indicus
  misc_feature (1)..(473): tr|A0A084GR08|A0A084GR08_BACID Isochorismate synthase M enF OS=Bacillus indicus OX=246786 GN=menF PE=3 SV=1
MITALEHTFTEKLKGALDEAGQLEEPVILSQVKTLHEIKNPLQFYAAGEQHFSGSRFYWATPGARFTICGLGSECTVENDAVSDRFGRIETEWKRFKNIVHHEDSESFHIGTGALLFGGFSFDPHNRSNEQWSHFPESKFFLPSVMLTVKENASYLTINRIIRPDDELEDCALHFTDLANKVLAAQQPVSMEPAGNYSLEEEDTQEWMSAVEKATASIKGGKLDKVVLAREVSVSYERDINVYAALNKLQIEQPGSFIFSIEIGSKSFIGATPERLIKKEGSRLLSTCLAGSIKRGDTKHEDTELGTALLNDEKNLIEHDIVVKMIKDSFEECCSEIRVPDGPQLLKTKNIQHLYTPIEGTMHGGRSLLSLVEKLHPTPALGGYPKAGALEMIRDIEPMDRGWYAGPVGWLDSDNNGEFAVAIRSGLIDGEQASLFAGCGIVAESDPQSEYQETLIKLKPMLSALGGMQHEQI

SEQ ID NO: 93377 - protein, 468 aa, Bacillus infantis
  misc_feature (1)..(468): tr|U5LH05|U5LH05_9BACI Isochorismate synthase MenF OS=B acillus infantis NRRL B-14911 OX=1367477 GN=menF PE=3 S V=1
MVTIQDTELKEGILEAIKRAGAFSEPILVSEVHKLDHIDPLSFFASGRQAFFGERFYWKDPSNETILAGLGICKLIQSDMASGRFSHVEKEWKRFIRNAVIYNEYSAAAAGPALFGGFSFDPEKEKTALWSKYPDSLFHVPRYLLTQTGGQTFLTTNVVCTKHDDVSLAEKIREERRLLLEGIGASVQEEESRLISEEEIHPQEWMDSVTSAVENLKAGKLKKVVLARELRLSFSGKIKAEQVLGKLHNEQNESFIFAFESQGDCFIGASPERLVKKKGKSLYSTCLAGSIPRGKTPADDQALGEALLSDEKNLIEHQYVVEMIKTAMDEACEEIIIPSKPRLMKMKHIQHLYTPVEGMTKEEASLLLLVDKLHPTPALGGLPKQEAVDMIREIEELDRGYYAGPLGWLDYSGNGEFAVSIRSGLLQGNEASLFAGCGIVESSNAESEFMETKIKFRPMRSALGGLTE

SEQ ID NO: 93378 - protein, 471 aa, Bacillus intestinalis
  misc_feature (1)..(471): tr|A0A136G802|A0A136G802_9BACI Isochorismate synthase M enF OS=Bacillus intestinalis OX=1963032 GN=menF PE=3 SV =1
MVTTVQRTFRKEVLHALHKAKEVNHAVLISYSRQIESLDPLSFFNYGAKKYTGNRFFWSDPESELTIVGLGKEAVFQTNQKNSERYREVFEQWERFKKTAFHIYEEEKLQHSAVGPVLFGGFSFDPCEERGTQWDHFSEGDFFVPALMLTMTAEGPFLTVNRWVSGEEDAETVLEGLKSFAAEFKVPDLNQVDQAVIAASQELDKDDWLKAIETATSQIKEKQYDKVVLARELLLTFEGPVQIEPVLKTLLNDQQTSYVFAIEQEGKTFVGASPERLIKRDGSTVMSSCLAGSIKRGANEEEDRRIGLELLNDEKNLLEHDIVVGMIHNAFASSCSEVEKPDGPVLYKTKSVQHLFTPIVGQLRESASLFDLIEKLHPTPALGGAPQKKAVEVIREIEPMSRGWYAAPIGWIDSQDNGEFAVAIRSGLIEGSTARLFAGCGIVEDSDPQSEYEETQIKLKPMISALGGERR

SEQ ID NO: 93379 - protein, 468 aa, Bacillus kochii
  misc_feature (1)..(468): tr|A0A248TK89|A0A248TK89_9BACI Isochorismate synthase M enF OS=Bacillus kochii OX=859143 GN=menF PE=3 SV=1
MFTLQHTEFKEGFIKALSKAQRTNHDILFSEVCEIDCIDPLAFFGAGKKTELGDRFFWTGSDNEVVITGVGINYLFQSDQTTDRFFYVQKKWQSLLDDAIIHNSYSIDAIGPTLFGGFTFDPLKEKTKLWSQYKHTDFHLPQYMCTITGGRAFLTTNMLVHPHDREERIEYMLEERRQLLQNAKVLPTGINNKVIAQHEVASREWKKAVAQVVDEMKKNVIQKVVLARETRLTFAHPVQIESVLQNLLDKQKNSFIFAFESGSDCFIGATPERLVKKQGHTLYTTCLAGSMKRGETKEEDDVLGKELLQDEKNLQEHQYVVDMIRQAMEMVGTEVELPEGPQLLKLRDIQHLYTPVIAAASKEGSLLAIIEKLHPTPALGGVPTEKAIEVIRGLEILDRGLYGSPIGWLDYQGNGDFAVALRSGLIQGNEASIFAGCGVVKDSEVESEFQETKIKFRPMLSALGGELK

SEQ ID NO: 93380 - protein, 471 aa, Bacillus koreensis
  misc_feature (1)..(471): tr|A0A0M0L7V2|A0A0M0L7V2_9BACI Isochorismate synthase M enF OS=Bacillus koreensis OX=284581 GN=menF PE=3 SV=1
MIAMTESFIQKTLQDASDFAKETGMPKLVSIVKDVHKMSPQTFLMNGKRVYNGDRFLWSNPDRSYTFAGVGVSHIFTTDNADGRFQDIEREWKRFNEQTVVHSISYPYGTGPLIVGGFSFDPNKQSTNLWNKFPSAKFVIPAFLYTVVNDQAYFTANVMVHPHKEVHDYIKEVEEAEKMLLNFTTIPEKSSSIMVNRHEIEPDKWKKTIQKATSAIKRDEFEKVVLARELRVTFDQELQLEQITDRLMAEQPTSYVFAIEQGENCFLGASPERLVKKVKDKVYSTCLAGSIRRGKDEEEDGVLGKELLTDEKNLIEHDVVVHMIKEAMNEYCEWIESPSHPALYKTKHIQHLYTPVEGEMKKDHTLLSLVEHLHPTPALGGYPKRTSVEFIRDVERLDRGWYAAPIGWMDVEGNGEFIVGIRSGLVKKNEASLFAGCGIVADSDPESEYEETNIKFNPMLSALGGATHDTH

SEQ ID NO: 93381 - protein, 463 aa, Bacillus kyonggiensis
  misc_feature (1)..(463): tr|A0A4U1D298|A0A4U1D298_9BACI Isochorismate synthase M enF OS=Bacillus kyonggiensis OX=1037680 GN=menF PE=3 SV =1
METELKKGIEEAIAKSKKSLIPILVSEVQKIDHIEPLSFFTVGKENYLGERFFWKDPTDSIYLIGLGVCHQIQSVDNRFNQVEDQWNQLLKEAIIVKDEEQKATGPFMFGGFSFDPLKKKTSLWSKYADSLFHVPKYLLSIVEGKTYLTTNIVCTQYDDSSIFEQTIVERQALVSKASKEYKSHFSMLVEEREVVDPEEWKQTVRDLVRDLKNGELKKVVLARELRLVFQDAVLVEGVLEQLLQEQKESFTFAFESNGDCFIGASPERLVKKEGNQLFSTCLAGSIARGKTEKEDKQLGDQLLNDAKNLREHLYVVEMIKEAMEKVCNEVKLPSRPSLMKMRDIQHLYTPVVGFSKEECSVLQVVDSLHPTPALGGLPQRQAVEKIRKIENLDRGFYAAPIGWLDYEGNGEFAVAIRSALIQGNEASLFAGCGIVQDSDAESEYVETKIKFRPMLSALGGLKK

SEQ ID NO: 93382 - protein, 462 aa, Bacillus lentus
  misc_feature (1)..(462): tr|A0A2X4WB48|A0A2X4WB48_BACLE Isochorismate synthase M enF OS=Bacillus lentus OX=1467 GN=menF PE=3 SV=1
MLTKTLMKSRFDRASKQVKHNDQAKLYSFTIKIDPCDPILFYKNNQHLYEGKSFFWKSPDEDFSLVGLGAAYIIKRNSSTSDRFKYIEKKWNKLCEQATIENPYEVPGTGPLLFGGFSFDANSMKEEEWNSFDQSLFYLPEFLLTVVDSVYYVTVNHFSEKYATIEEAKVLIDQLISNAVMYQQSEPVPIIKQEEIEPNDWVEKVEEIVQDLKQTSLQKVVMARKMKLKFAEPANIPHVIQQLVLQQPNSFIFALNVEKSCFLGASPERLVKKTGSEVLSTSLAGSIERGSDLKEDKELEKQLLHDQKNLFEHQLVVSMIKDALGPHCDKMNIPTQPMIMKTPDIQHLYTPVVGQMKPENSILQVLEGLHPTPALGGVPTKDALEIIRKKEEMDRGFYAAPVGWMDYRGNGEFIVAIRSGLIKEDEAYLYAGCGLVSESKPEDELIETRIKFRPMLRATGGN

SEQ ID NO: 93383 - protein, 474 aa, Bacillus licheniformis
  misc_feature (1)..(474): tr|Q65FT1|Q65FT1_BACLD Isochorismate synthase MenF OS=B acillus licheniformis (strain ATCC 14580 / DSM 13 / JCM 2505 / NBRC 12200 / NCIMB 9375 / NRRL NRS-1264 / Gibso n 46) OX=279010 GN=menF PE=3 SV=1
MVTTVQRTFLKEAPEALNIVKKVNHAVLISYSRKIESIDALSFFINGKEQFAGERFFWSDPDGGLTLVGLGKEISVSTDLKDAGRYQAVHEKWERLKEKTYHFHEDQSRGQAAVGPLLFGGFSFDPLEDRKQHWNGYQEGAFFIPAAMLTQDGEETFITVNRWKTPEEDVRKVLEEIKGAASQLTKADDSRYPEKGHTQYTAKEELDVPEWLEAVRRATDDIKNGKYDKVVLAREILLTFDQPVELHRVLFNLMSEQKTSYIFAIEENGKSFVGASPERLVKKDGENVLSTCLAGSIKRGESEQEDRMLGLELLNDEKNLIEHDIVVNMIHQALLSNCSNIKKPAKPGLYKTKNVQHLYTPIVGKMNAESSIFDLIEKLHPTPALGGAPQQKAIEVIRELEPMSRGWYAAPAGWIDMSGNGEFAVAIRSGLIDSNAARIFAGCGVVADSDPLMEYEETQIKMKPMLSALGGDIR

SEQ ID NO: 93384 - protein, 472 aa, Bacillus litoralis
  misc_feature (1)..(472): tr|A0A5C6VE36|A0A5C6VE36_9BACI Isochorismate synthase M enF OS=Bacillus litoralis OX=152268 GN=menF PE=3 SV=1
MSLITTLDHTIKELIQQTLEEAKQTNQSVIVSHIKEVDAIDPLHFLASSEELFLGERFLWSTPERDFTLAGVGNELILENNHSTIERFSAIEKEWKRFKKRIINTNSKDKQDGTGPLLFGGFSFDPIKEKDPLWEAFSEAKFTLPTVMVTIINSKTYLTVNKLVTPHDNLLDCLKHFEQTYSQTTHHHLIDCEKVNEFSTIEYKTSQWLKAVDKATNEIRLKEMDKVVLAREVHLKFAEKVNPYQVLNRLHKEQPTSFIFGFENGLQHFVGATPERLIKKQDNEVLSTCLAGSIKRGKTQEQDIQLGEQLLKDAKNLIEHDIVVKMIKEALTNCCYEVISPKSPTLLKTKNIQHLYTPVKGYVQKGHSLLSIVENLHPTPALGGFPKEKAIEKIRELEPMHRGWYAAPIGWLDAEDNGEFVVAIRSGLIEGHNVALFAGCGIVAESNPKSEYLETKIKLKPMMSALGGVDNE

SEQ ID NO: 93385 - protein, 469 aa, Bacillus loiseleuriae
  misc_feature (1)..(469): tr|A0A0K9GYE7|A0A0K9GYE7_9BACI Isochorismate synthase M enF OS=Bacillus loiseleuriae OX=1679170 GN=menF PE=3 SV =1
MAISHETEWFYGLQQAVQKAKQQKQKVLFSVVREIDDLDPLSFYHAGRERYAGERFYWQDPEKELTIAGLGIVEKIQVKADAKRVRNIEANWTELQKNAVKVGVSGVVGTGPLVFGGYSFDYNKTDSLLWDQFGDSLFYIPAFMLSIVKGQAYLTTNIVCTSEDEANLFIDLINERENDIRNRLTNVAVSVNEYVEQIEDNPEGWKKIVAEAVLHMKHSELDKVVLARELRIVFKERIETVAVLRRLQKEQAGSFIFCLESAGDCFIGATPERLVKKHGNELFSACLAGSIARGKDAKKDRKLEHELLHDQKNLLEHQYVVSMIKDALSLVCKKLDVPKDPTVMKNRHIQHLYTPVSGECDANVSIFDVIGKLHPTPAMGGLPTEQAVAWIRENEELERGFYASPIGWSDSYGNGEFAVGIRSALIQGNEASLFAGCGVLEDSTPESEYEETGIKFNPMLSALGGNLHE

SEQ ID NO: 93386 - protein, 469 aa, Bacillus marisflavi
  misc_feature (1)..(469): tr|A0A163MYB8|A0A163MYB8_9BACI Isochorismate synthase M enF OS=Bacillus marisflavi OX=189381 GN=menF PE=3 SV=1
MVTIQKTNIDQAYDAALLKAQQINLPVLFSMVEETGAMDPLSFYHAGGRVFKGERFLWKDRDQTISLIGAGSSYDMSSSLKEGERFFAIEKEWKRFISDAVVVSREEWSGTGPLAFGGFRFDSANPASAEWTGFDEGTLRIPRYMLTKAGEANYLTVNIVCRPDGSGPSLQHCLKEKDLLLTMASEPASQMDPGDMSAEDIRAHEWKQSVRNVVDRLKNGEMEKVVLARKTKVSFSDEVTSDYVLDNLWKQQPDSFIFSFEQEGSCFIGATPERLVKKDGEEILSTCLAGSIARGSDLEEDERLGRELLEDDKNRYEHQLVVDTIRQALSSDCERLSIPDEPQLMKLKDIQHLYTPVKGTAPSGLSILTLVEKLHPTPALGGVPRKEAMQVIREEEQMDRGLYAGPIGWMDAYGNGEYAVALRSGLLKGDHAFIYAGCGIVAHSDPDSEFKETQMKFRPMQRALGGNLI

SEQ ID NO: 93387 - protein, 473 aa, Bacillus megaterium
  misc_feature (1)..(473): tr|D5DUK5|D5DUK5_BACMQ Isochorismate synthase MenF OS=B acillus megaterium (strain ATCC 12872 / QMB1551) OX=545 693 GN=menF PE=3 SV=1
MIATTEQLVQEYIKDAIECAKNENQPKLVSLVKKVRPIDPLIFYANGHDQFYKERFFWKDPNSYYTFVGLGYAHTICTNAAKERYFHIENEWKRFIKEDFYKNNQIFPDGTGPLLFGGFSFDPNQYRENYWSDFPSSKFMIPTVLYTQVDKEGYLTVNMMVKGQDSVKKHINYFEEVQKLVLCEEYDGESHISPLLLEKEEIGVEKFKGNVERATTLIKQQAIEKVVLARQLKVKFNEDISTEYVLQRLLKEQPTSYTYILEGEHQHFIGASPERLVQKQGDYVFSTCLAGSIPRGKTRQEDHELGEELLQDPKNLIEHDVVVHMIKEAMNSYCYEVEIPSTPSLYKTKHIQHLYTPVKGRIKEDVTLFSFIQKLHPTPALGGYPQQEALPIIRQLESFDRGWYAAPLGWMDINGNGEFIVGIRSAVIHQKEAVLFAGCGIVADSTPESEYEETRIKFNPMLSALGGIMRGTH

SEQ ID NO: 93388 - protein, 466 aa, Bacillus mesonae
  misc_feature (1)..(466): tr|A0A3Q9QWZ2|A0A3Q9QWZ2_9BACI Isochorismate synthase M enF OS=Bacillus mesonae OX=1193713 GN=menF PE=3 SV=1
MLTIQGTEIKDRGITAVKKAQQLGRPVLLSEVYKLDSINPLSFFKIGSERFLGERFFWKDPKGENILIGLGISKQIQSDQATDRFFRVGKEWGDLLEDSLIFNEYVEMGVGPVLFGGFSFDPNKEKTELWSKYPDSLFYLPKYLLSIINEEAYLTTSIVCMPQDDHTLFERILDERNELLHSLYQNSQNEQAVLLETKEIAPEQWKQSVNDVVKELTGGPLKKVVLARELRLIFDKQIEAETVLENLYRQQHESFIFAFESNGDCFLGASPERLVKKQENEILSTCLAGSISRGKTVEEDVRLGETLLHDQKNLIEHQYVVEMIKEALEESCEKVIIPDHPQLMKVRDIQHLYTPVIGEARNDTSLLLLVEKLHPTPALGGLPKREAVEKIRQVEVLDRGFYAAPLGWLDYRGNGEFAVALRSGLIQGNEASLFAGCGVVADSKSESEYLETGLKFRPMLRALRGE

SEQ ID NO: 93389 - protein, 464 aa, Bacillus mobilis
  misc_feature (1)..(464): tr|A0A386V7J7|A0A386V7J7_9BACI Isochorismate synthase O S=Bacillus mobilis OX=2026190 GN=MLA2C4_25275 PE=4 SV=1
MIQTKQIGLQEVLAAAIKRATDEKILVSFVKQIDWMDPLLFYAAGKRIAFENRCYFADPAQHVIFAGIGSVFTIATASQKRFQTTREEWDKVKEKAFVQREKYEFGTGPLLFGGFSFDQEKEKTDLWKEFDDTTFSLPAFLLTVKNEKAWLTMNTFVSATDCAETLYNEIVSLEEKIFGESKCALEGLKLTVTSKVEVDPKGWMKAIEKVQDEMKQGNVQKVVLARELKIEMDHHIDSALVLEALRIGQPDCYVFSFDYKGACFLGATPERLIRKEDEKFTSMCLAGSTGHGQSIEESKRNSNALLHDEKNLAEHGYVVNMIRSVLNEHCQSVNIPESPGLLTTKNLIHLYTPVEAKGDASLLTMVEELHPTPALGGTPRLEAMKLIRDVELLDRGLYGAPIGWIDDEGNGEFAVALRCGLLNGEKASLFAGCGIVIDSVPQLEYEETSLKFRPMLGALEELMK

SEQ ID NO: 93390 - protein, 469 aa, Bacillus muralis
  misc_feature (1)..(469): tr|A0A1B3XUE4|A0A1B3XUE4_9BACI Isochorismate synthase M enF OS=Bacillus muralis OX=264697 GN=menF PE=3 SV=1
MAISEETEQFQGLASAIQKAKDLNDQVLFSHIKKIQCTNPLSFYQAGRERYAGERFFWEDPAKEITITGLGNVKKLKAAANAERYREVEKSWIKLQETAVKTGVTDVEATGPLLFGGFSFDYESNSTILWNHFGDNLFYIPAFMLSIVGKQAYLTTNLLCSPDDSEKLFRDMINEREAFLSEGLDGVPCGPNSLVKQREVQSAEWKRTVTEAVEEIKTTDLDKIVLARELRLTFEHSIDSGKVLEQLIAEQPLSYIFSLEAGGDCFVGATPERLIKKQGDAVFSTCLAGSMGRGKDQREDVSLGNELLHDQKNLQEHQYVVSMISNAFDAVCEKVVIPDGPELMKNRHIQHLYTPVRGVAKEGVTILQFVENLHPTPAMGGLPKGKAVVRIREMEGLERGFYAGPLGWMDTYGNGEFAVGIRSALIQDNEASLFAGCGVVEDSTASAEFRETGIKFNPMLSALGGNLNE

SEQ ID NO: 93391 - protein, 398 aa, Bacillus mycoides
  misc_feature (1)..(398): tr|A0A090YU05|A0A090YU05_BACMY Isochorismate synthase d hbC OS=Bacillus mycoides OX=1405 GN=dhbC PE=4 SV=1
MTKQIVAVRESGLKLLEDYKTESPFFFASPYRTILAEGTFATVKHKEVKSFPELVQAVLSNAKKAGHPNPIVVGALPFDHRKAVELVVPEESRITSRLELDSTNQIQQPSKLTYEMKPVPEPSGYMDGVKQGISKIKEGDLKKIVLSRSLDLKSSEKIDIQKLLFDLAQHNKHGYTFAVNLSQDEKEKNKTLIGASPELLVSRNGMQVISNPLAGSRPRSEDPVEDKRRAEELLSSPKDLHEHAVVVEAVAAALRPYCHTLHVPEKPSVIHSETMWHLSTEVKGELIDSSVSSLELAIALHPTPAVCGTPTEKAREAIQEIEPFDRNFFTGMLGWSDLNGDGEWIVTIRCAEVQENSLRLFAGAGIVGESKPEEELAETSAKFRTMLRAMGLNDETLK

SEQ ID NO: 93392 - protein, 471 aa, Bacillus nakamurai
  misc_feature (1)..(471): tr|A0A150FBT2|A0A150FBT2_9BACI Isochorismate synthase M enF OS=Bacillus nakamurai OX=1793963 GN=menF PE=3 SV=1
MVTTVQHTFRKEAVHALHKAKQVNHAVLLSYSRRIASLDPLSFFNYGAKKYKGKRFFWSEPGSELTIVGLGTEAVFQSKEKNEQRYHDVFEQWERFKKTAFHIHEEEQAQHSAIGPVLFGGFSFNPSEERGDEWNGFEEGLFFIPSLMLTKTADGDYVTVNQWVGEADQAEDVLERLKSFSEAFTVSSLTYEDYPALTKAEELDVENWLEAIKTATNEMKENQYDKVVLAREVLLSYDGPIPIESVLNKLLTDQTTSYIFASEQGNKCFIGASPERLIKKAGKNVMSSCLAGSIKRGENEQEDERLGWELLHDEKNLMEHDFVVKMIHGAFLSSCHDVEKPAGPQLYKTKNVQHLYTPIVGRLKTSASLFDLIEKLHPTPALGGAPQKKAVEVIAELEPMTRGWYAAPIGWIDSRENGEFAVAIRSGLIEGNEARLFAGCGIVEDSDPQSEYEETQIKLKPMISALGGERL

SEQ ID NO: 93393 - protein, 469 aa, Bacillus notoginsengisoli
  misc_feature (1)..(469): tr|A0A417YDQ0|A0A417YDQ0_9BACI Isochorismate synthase M enF OS=Bacillus notoginsengisoli OX=1578198 GN=menF PE= 3 SV=1
MVTIHETELKEKILLGITKAGELNRPILVSEVNKVEPTEPLAFFNNGNEAFFGERFYWKNPEGSLNIAGVGIAAQLSSEQAEGRFSKIDRKWKQLIQDSIVSTPHHAPGIGPLMFGGFSFDPLKEKTALWSKYPEALFHVPRFMLTMVDGDVYVTTNVLCTKHDDVSLFYKVVAERDSLLKEDEHLAVGKTAPLKGMTEIKPAEWKKSVTEAIRQLNMEGLLKKVVLARELRLFFDKKVETGTLLQNLESEQKTSFIFSFESGGDSFIGASPERLVQKHGKSVQSACLAGSFPRGKTDTEDRQLSSQLLNDEKNLAEHQYVVDMIRNALEGACEQVKIPDKPSLMKIRDIQHLFTPVEGVALDTTSLLDLVERLHPTPALGGLPKQLAVETIRELEELDRGFYAAPIGWMDYAGNGEFAVAIRSGLIQGQEASLFAGCGVVANSDVESEYVETRLKFRPMLSALGGTIE

SEQ ID NO: 93394 - protein, 468 aa, Bacillus oceanisediminis
  misc_feature (1)..(468): tr|A0A160MGR6|A0A160MGR6_9BACI Isochorismate synthase M enF OS=Bacillus oceanisediminis 2691 OX=1196031 GN=menF PE=3 SV=1
MVTIQDTELKEGIQEAIERAKSLSKPVLVSEVQKINHIDPLSFYAAGKSRFFGERFFWKDPSGETYIIGLGICKQIQSDQSTGRFNHVEKEWKRFINNSIIFNPYDKNATGPVMFGGFSFDPLKRKTKLWSKYSDSLFHVPTYMYSEMNGQAFLTTNVVCTQHDGDSLFEKIVAERGMIMASISDYHPENANTLQEEADINPEKWMETVDAVVDELKSGSLKKVVLARESRLIYDKPIEIERVLWNLMEMQRESFIFAFESNGDCFIGASPERLIKKYGENVFTTCLAGSIPRGKTAEDDHILGDALLHDQKNLTEHQYVVDMIKEAMEESCSEVELPDEPQLMKMRDIQHLYTPVIGKTKGDASLLALVDRLHPTPALGGLPKREAVEKIREVEELDRGFYAAPLGWMDFRGNGEYAVTIRSGLIQGNEASLFAGCGVVQDSNAESEYQETKIKFRPMLTALGGYEK

SEQ ID NO: 93395 - protein, 469 aa, Bacillus oleivorans
  misc_feature (1)..(469): tr|A0A285CW03|A0A285CW03_9BACI Isochorismate synthase M enF OS=Bacillus oleivorans OX=1448271 GN=menF PE=3 SV=1
MAVAQPVLFAAKALEAIHMAKQKNEPFFVSEILKIDAINPFLFYHAGQALYQNERFFWKNADDTLQLVGLGSAFSILSNEDHGRFAHVEEEWTKFKGRVVSDNKGKIEGAGPVLLGGFSFDPKKREAGIWSSFPNAQFFVPKFLLTIHNHKDVYLSVTFACKPYDEESIVKGVNQELEMLLSDARKSFENTRPLLVSKEEIAPDQWKASVSSAIDALKNKELEKVVLARKIKLTFEQELDVTSILQTLDQEQKDSFVFSFDWQGASFLGATPERLVRKKGDLAQSTCLAGSIGVGQSDDETAELGKWLLKDEKNTVEHNYVVQQITKTFENLCLEVQVDEKPKVLKMRDIQHLYTGIRGKVLHHVSLLDFVESLHPTPALGGTPRNKALQVIRDLEQMDRGFYAAPIGWCDFEDNGEFVVGLRSGLIQDHKATLFAGCGVVENSVPEKEYEETRIKFRPMLSALGGMEN

SEQ ID NO: 93396 - protein, 464 aa, Bacillus pacificus
  misc_feature (1)..(464): tr|A0A5C4ZHN4|A0A5C4ZHN4_9BACI Isochorismate synthase O S=Bacillus pacificus OX=2026187 GN=FHY68_24745 PE=4 SV= 1
MIQTKQKGLQEVLSAAIKHATDKKILVSFVKQIDWMDPLLFYAAGKRIAFENRCYFADPAQHVIFAGIGSVFTIATASHKRFQTARDEWDKVKEESFVQRERYEFGTGPLLFGGFSFDQEKEKTDLWKEFDDTTFSLPAFLLTVKNEKAWLTMNTFVSETDCAETLYNEIVSLEEKILEESKCALGGSKLTVTSKVEVDPKGWMKAIEKVQDEMKQGNVQKVVLARELKVEMDHHIDSALVLEALRIGQPDCYVFSFDYKGACFLGATPERLIRKEDEKFTSMCLAGSTGHGQSIEESKRNSDALLHDEKNLAEHGYVVNMIRSVLNEHCEFVNIPESPGLLTTKNLIHLYTPVEAKGDASLLTMVEELHPTPALGGTPRLEAMKLIRDVELLDRGLYGAPIGWIDDEGNGEFAVALRCGLLNGEKASLFAGCGIVIDSVPQLEYEETSLKFRPMLGALEELMK

SEQ ID NO: 93397 - protein, 474 aa, Bacillus paralicheniformis
  misc_feature (1)..(474): tr|A0A1Q8H0E3|A0A1Q8H0E3_9BACI Isochorismate synthase M enF OS=Bacillus paralicheniformis OX=1648923 GN=menF PE =3 SV=1
MVTTVQRTFLREAPEALNIVKKVNHAVLISYSRKIESIDALSFFINGEEQFAGKRFFWSDPDGGLTLVGLGKEISVSTDLKDAGRYQAVHEKWERLKEKTFHFHEDQCTSQAAVGPLLFGGFSFDPLEDRKQHWNGYQEGAFFIPTAMLTQDGEETFITVNRWKAPEEDVRKVLEEIKGAASQLIKADASRYPENGHARFTAKEELDVPEWLEAVRRATDDIKNGKYDKVVLAREILLTFDQPVELHRVLFNLMSEQKTSYIFAIEENGKSFVGASPERLVKKDGDNVLSTCLAGSIKRGESEQEDRMLGLELLNDEKNLIEHDIVVNMIHHALLSNCSNIKKPAKPGLYKTKNVQHLYTPIVGKMNAESSLFDLIEKLHPTPALGGAPQQKAIEVIRVLEPMSRGWYAAPAGWIDMSGNGEFAVAIRSGLIDSKEARIFAGCGVVADSDPHMEYEETQIKMKPMLSALGGDIR

SEQ ID NO: 93398 - protein, 464 aa, Bacillus paranthracis
  misc_feature (1)..(464): tr|A0A4U1DHH5|A0A4U1DHH5_9BACI Isochorismate synthase O S=Bacillus paranthracis OX=2026186 GN=CQB03_12515 PE=4 SV=1
MIQTKQIGLQEVFSAAIKRATDEKILVSFVKQIDWMDPLLFYAAGKRIAFENRCYFADPAQHVIFAGIGSVFTIATASHKRFQTARDEWDKVKEKAFVQREKYEFGTGPLLFGGFSFDQEKEKTDLWKEFDDTTFSLPAFLLTVKNEKAWLTMNTFVSATDCAETLYNEIVSLEEKIFEESKCALEGSKLTVTSKVEVDPKGWMKSIEKVQDEMKQGNVQKVVLARELKVETDHHIDSALVLEALRIGQPDCYVFSFDYKGACFLGATPERLIRKEDEKFTSMCLAGSTGHGQSIEESKRNSDALLHDEKNLAEHGYVVNMIRSVLNEHCESVNIPESPGLLTTKNLIHLYTPVEAKGDASLLTMVEELHPTPALGGTPRLEAMKLIRDVELLDRGLYGAPIGWIDDEGNGEFAVALRCGLLNGEKASLFAGCGIVIDSVPQLEYEETSLKFRPMLGALEELMK

SEQ ID NO: 93399 - protein, 468 aa, Bacillus praedii
  misc_feature (1)..(468): tr|A0A4V2NUH6|A0A4V2NUH6_9BACI Isochorismate synthase M enF OS=Bacillus praedii OX=1742358 GN=menF PE=3 SV=1
MVTIQETELKEGILKAIERAKALSKPVLVSEVQEINHIEPLTFFAAGHEPFLGERFFWKDPADETFILGLGICKQIQSDQAADRFFLVEEEWKNFIKDGIINNPFHLNGIGPLMFGGFSFDPYKEKTKLWSKYSDSLFHIPKFMYSEINGRSFFTTNIVCTQHDDLSLAEAVQKERRTIFTALAADTYQEKYELINENEINPDQWKDTVAAVVNELKQRELNKVVLARETRLHFSQSIQLEQVLMNLFKLQRESFIFAFESNGDCFIGASPERLVKKSGSSFFTTCLAGSIARGKTDEEDRLLGDTLLADPKNIIEHEYVVRMIKEAMEEVCDEVTMPSKTQLLKTRDIQHLYTPVTGKAKKDTSLLLLVDRLHPTPALGGLPKEKAVEKIREVEELDRGFYGAPLGWVDYKGNGEFAVSIRSGLIQGDEASLFAGCGVVEDSNPESEYIETKIKFRPMLTALGGSNQ

SEQ ID NO: 93400 - protein, 99 aa, Bacillus pseudomycoides
  misc_feature (1)..(99): tr|A0A2B5TRQ0|A0A2B5TRQ0_9BACI Isochorismate synthase ( Fragment) OS=Bacillus pseudomycoides OX=64104 GN=COL84_ 29255 PE=4 SV=1
MINTTISKNNSLDLLNEYQAGSTFFFASPFRTMLAEGINTIVHQDQIEKIPELIVEVLNNVKQMGHPNPIIVGAFPFDCNKGVKLIVPQECKIAERLQP

SEQ ID NO: 93401 - protein, 472 aa, Bacillus pumilus
  misc_feature (1)..(472): tr|A8FGL0|A8FGL0_BACP2 Isochorismate synthase MenF OS=B acillus pumilus (strain SAFR-032) OX=315750 GN=menF PE= 3 SV=1
MVTTVQSTFRQEALATLEEANNVNHAVLISYSRRVDDLDPLAFFQSGEADFLGERFFWSDPESQMIFSGLGRAAVIKSSEQGKERFDTVHQEWEQLKQHMFHFHDEKELRQAAVGPLLFGGFSFDPYEEKARHWEAFGEAHFFVPSMMLTVSKEGTFLTINEWKQVDGNVHQLIQELEQKASQFKTLPLRYDGQAELVHMEELDVNEWMKAIQEATDHIRANEYEKVVLAREVLLHYKNQIELAPLLSALLKHQTTSYVFAVEQGRQAFVGATPERLVKKSGGEVFSSCLAGSIVRGKNEEEDKALGEELLHDEKNLIEHQIVVNMIEQAFEANCLRVHKPNQPSLYKTKNIQHLFTPIVGEIKNSCSLFSLIEQLHPTPALGGYPKEKAVEVIREIEPLKRGWYAAPVGWIDSQDNGEFAVAIRSGLIEEDHVRLFAGCGIVEDSLAKQEYEETQVKLRPMLSALGGCPIE

SEQ ID NO: 93402 - protein, 392 aa, Bacillus safensis
  misc_feature (1)..(392): tr|A0A5C0WHQ6|A0A5C0WHQ6_9BACI Isochorismate synthase D hbC OS=Bacillus safensis OX=561879 GN=dhbC PE=4 SV=1
MKHSLLSSEEKIQLLQDYQPGAFFLASPKRTILAEGIFQHIETNQLNELSTRVAHVFDDAKQAGIQTPIVAGAVPFDPAQPVRLNVPVHVQFSDPLEFQQGDEESEAASPSYEVTPVPAPEVYMNGVNEGLAKIENGELSKIVLSRSLHLKANRDIHTKTILERLARHNTTGYTFAANVADPASSQKRTLLGASPELLLSKTGSSVISNPLAGSRPRSSDPVEDQRRRDELLTSAKDLHEHAVVVEAVTKALTPYCHTLDVPASPSVIQTETMWHLSTVVKGDLIDSSVSSIDLALSLHPTPAVCGTPTADAREAIQAIEPFDRGFFTGIIGWADTNGDGDWIVTIRCAEAEGHSLRLFAGAGVVKGSKAEEELAETSAKFNTMLHAMGIHQ

SEQ ID NO: 93403 - protein, 468 aa, Bacillus salacetis
  misc_feature (1)..(468): tr|A0A3A1R2V0|A0A3A1R2V0_9BACI Isochorismate synthase O S=Bacillus salacetis OX=2315464 GN=D3H55_06980 PE=4 SV= 1
MSIIQDIKIGGSFEKALAKAEAEGIPVLYSAVQKVSRVNPLSFYTKGFSLYNGERFFWKDKENNTQIAGLGSSYMLRNDSEDNRYDSIENEWKRLIGNAVIESEREIAGTGPLLFGGFSFDPTVPRSKEWSDFSHGIFQLPTFMLTVTEEGSYLTTNILCTSQDDETLLDIIDKKQRELLGQPEERDSALTLLKAVEIAPEEWKASLEGVVSQLKAGEMDKVVLARKMLMAFKDKPSSDEVIHNLLNEQRDSFIFSLEVANSCFLGASPERLVKKEDAEILSTCLAGSIARSTDPEEDRRLGESLLGDEKNRHEHHLVVEMIKDVLDQHCSEVQIPDEPVLMKVRDIQHLYTPVKGKAGNGTSILKFVSQLHPTPALGGVPRDKAMETIKEAENMDRGLYAAPMGWMDAYGNGEFVVSIRSGLIHKDEAFLFSGCGVVADSTAESEYRETQIKFKPMFRALGGNTDGL

SEQ ID NO: 93404 - protein, 474 aa, Bacillus salsus
  misc_feature (1)..(474): tr|A0A1H0QGU1|A0A1H0QGU1_9BACI Isochorismate synthase M enF OS=Bacillus salsus OX=930152 GN=menF PE=3 SV=1
MVLKQHSNNTIDQVRKGVSRTQEQHNNHVLLSRVVEAKNIDPLLFFEAGKTFFEGERTFWANPSFNTILVGLGKAHEIEVDRSANRFDEVETKWKELINQLDDKNEMKYGTGPILFGGFSFDPKRNKTSLWNDFSNATFVLPKILLSVIDGECYFTFNHISGPNGDTEVLDNIEEIKNQLVNSMNEKIGHHEEMKKEFVKSEVNPEKWMSSVKEVVNDIKNGDVEKVVLAREINLTFKNQINIDEVLFNLREQQPMSYLFVFENKHACFIGASPERLIKKKANTIKSTCLAGSIGRGQTINLDQELGKQLLQDQKNMIEHEVVVSMIKEAMIASCKTISSSNRPQLLKMRHIQHLYTPIKGEAKSDVSLLSMVKKLHPTPALGGFPSNKAIEKIREVELLDRGWYAAPIGWVDGNDNGEFAVAIRSGLLRGKDASLFAGCGIVADSDPIEEYKETNIKFKPMLSALGGLEDESN

SEQ ID NO: 93405 - protein, 468 aa, Bacillus selenatarsenatis
  misc_feature (1)..(468): tr|A0A0A8X950|A0A0A8X950_9BACI Isochorismate synthase M enF OS=Bacillus selenatarsenatis SF-1 OX=1321606 GN=men F PE=3 SV=1
MVAIQETELRQGILDAIERAKGQSQSVLVSEVHKIDRIDPFYFFASGREKFFGERFFWKDPEGEDFLAGLGICGQIQSDQGADRFFHVEKEWKRFMGTALVFNKHNVNGTGPSMFGGFTFDPLKKKTSLWSKFSEALFHIPKYMLTIVKGEAYFTTNVICTQHDDMSLFDKVTREREEVLSNAGQKPALGRLDLKDIIEIDPEAWKQTVTDVVNGFENSELKKVVLARELRLHFTDEVQSESVLANLLENQHKSFTFAFESNGDCFIGASPERLVKKDGASLFSACLAGSIARGITPDEDESLGEELLTDEKNLIEHQYVVDMIKGAMEETCDEVILPEQPVLMKMKYIQHLYTPVIGRNREGTSLLHLVNRLHPTPALGGLPKQAAIVKIREIEQLDRGLYAAPVGWMDYQGNGEFAVAIRSGLIQGNEASLFAGCGIVADSNAESEYKETSIKFRPMLTALGGKIT

SEQ ID NO: 93406 - protein, 398 aa, Bacillus siamensis
  misc_feature (1)..(398): tr|A0A2K9KCY4|A0A2K9KCY4_9BACI Isochorismate synthase O S=Bacillus siamensis OX=659243 GN=CWD84_04830 PE=4 SV=1
MTNQHLLTEVSAKEVLDAYKPGAFFLASPKSTLLAEGVFAKVPDTDAENQLDSLPERVRQTLLEAKQAGIKHPIAAGAIPFDGRKASRLFVPKAVLTAGPLSFTEASAEKPQANTYDIRPVPDPEGFMSGVEQGVLNITDGPLSKIVLSRTLHLTAERDIDIPQAVKHLAQHNPRGYTFAADVTGTSETRKTLFGASPELLLSKNGTSILSNPLAGSRPRSTDPAEDQRRAEELLQSAKDLHEHAVVVAAVAAALKPFCRVLDVPEKPSLIKTEAMWHLSTVVKGELSDPSTTSLELAIALHPTPAVCGTPTDAAREAIQNIEPFDRNFYTGMAGWCDAEGDGEWIIALRCAEAETRSLRLFAGAGIVAGSKPQDELDETSAKFRTMLRAMGLYQDEM

SEQ ID NO: 93407 - protein, 407 aa, Bacillus simplex
  misc_feature (1)..(407): tr|A0A109MU15|A0A109MU15_9BACI Isochorismate synthase O S=Bacillus simplex OX=1478 GN=AS888_08665 PE=4 SV=1
MIKSKENSTVLEKQLLDDYEVGDFFLASPSQTILGKGSFLTVPNDRENRDQMTSLAARVAAALKTAKEQGHPNPMVTGAVPFDYEKDAQLIVPGMIWTSVPLQDLGTSQQAGTSKPDYEIESVPEPSRYMDGVEQGLTHIKSGHLDKIVLSRSLHLTSSEQVNINRLLQNLARHNKNGYTFAVDLPQPETENADPDNLKTLIGASPELLVSRTGLQVVANPLAGSRPRSDDPIEDKRRAEELLSSAKDLHEHAVVVQAVAEALRPFFKKMDVPEKPSVIHTETMWHLSTEVRGELQDPETSSLELAIALHPTPAVCGSPSELAREAIQEIEPFDRGFFTGMVGWCNAEGDGEWIVTIRCAEVEKQVLRLFAGAGVVAESKPEEELAETSAKFQTMLRAMGIDAKSLN

SEQ ID NO: 93408 - protein, 470 aa, Bacillus smithii
  misc_feature (1)..(470): tr|A0A0H4P2B1|A0A0H4P2B1_9BACI Menaquinone-specific iso chorismate synthase OS=Bacillus smithii OX=1479 GN=BSM4 216_2994 PE=4 SV=1
MSIKSHHLPVQLMSKLENRKRKNQAMLFSITEEMDFIDPLAFYYGNDSVYSGERFFWKDSESDTIIVGVGNAAVLRSEKGIKERYKEIEEKWNHLLKEAVIENAHKEVMGTGPLLFGGFSFDPGTIKEEKWAPFSSAYFVLPSFMVTIKKDRTYLTSNVIHTAHEEDDFLEKWISQKEKVIRNAKEVPGRMTAIVNVAEHGSNEWKQAVHKAVEQIHRNETLKKVVLARMLTVQFQERPFLEAVLKRLWEEQHESFLFALETMNRCFLGASPERLVQKWHENVLSTCLAGSIRRGKDLKEDQKLGQELMGDRKNRKEHQLVVDMIGSVINSLCENVQIPEQPELLKLSDIQHLFTPVVGKNRQNMSVLQFVERLHPTPALGGLPQQEGLEKIRQLEGIDRGLYGGPIGWIDGDGNGEFAVAIRSGLFHDAQAYLYAGCGIVADSEAESEYIETSIKFRPMLRAIGGDIHE

SEQ ID NO: 93409 - protein, 467 aa, Bacillus solani
  misc_feature (1)..(467): tr|A0A0Q3TCN0|A0A0Q3TCN0_9BACI Isochorismate synthase M enF OS=Bacillus solani OX=1637975 GN=menF PE=3 SV=1
MVTIQETELKEGILKAIERAKALSKPVLVSEVQEINHIEPLTFFAAGHEPFLGERFFWKDPADETFIIGLGICKQIQSDQAADRFFLVEEEWKNFIEDAIIDNPFQLNGIGPLMFGGFSFDPYKEKTRLWSKYSDSLFHIPKFMYSEINGRTFFTTNIVCTQHDDLSLAEAVQKERRTLFTALADDIYQEKYELINEDEINPEKWKDTVAEVVNELKQGELNKVVLARETRLHFSQSIQLEQVLMNLFKLQRESFIFAFESNGDCFIGASPERLVKKSGASFFTTCLAGSIARGKTEEEDRVLGDTLLADPKNIIEHEYVVRMIKAAMEEVCEEVTMPSKTQLLKTRDIQHLYTPVTGKAKKDTSLLLLVDRLHPTPALGGLPKEKAVEKIREVEELDRGFYGAPLGWVDYKGNGEFAVSIRSGLIQGDEASLFAGCGVVEDSNPESEYVETKIKFRPMLTALGGSN

SEQ ID NO: 93410 - protein, 401 aa, Bacillus sonorensis
  misc_feature (1)..(401): tr|M5PC21|M5PC21_9BACI Isochorismate synthase DhbC OS=B acillus sonorensis L12 OX=1274524 GN=BSONL12_17159 PE=4 SV=1
MIDHQMVSEALAEQLLHEYRTGASFFFSSPERTILAKGVFAAVPEEDGSGLEHLSQRAAAVLRDAEQSGRKRPIIVGAVPFDNAKPAQLTVPDEVWCAGPLVFEQSVQKHSQQGMAYDIQPVPEPEAYIRGVERGLAGIAAGDYSKIVLSRSLRLTSPEKIDIGRLLQNLAQHNTNGYTFAVDLPERAKEESHSARTLIGASPELLVSRTGFRVSANPLAGSRPRSDDPVEDQRRADELLASAKDRHEHAVVVQAVAAALKPFCRKLNVPAEPSLISTETMWHLSTEINGELTDLSISSLELAAALHPTPAVCGTPTDKARAAIKEIEPFDRGFFTGMVGWCDSVGDGEWVVTIRCAEAEDHALRLFAGAGIVAGSRPEDELAETSAKFRTMLLAMGLNNE

SEQ ID NO: 93411 - protein, 471 aa, Bacillus sp.
  misc_feature (1)..(471): tr|A0A1J5WWE7|A0A1J5WWE7_9BACI Isochorismate synthase M enF OS=Bacillus sp. FMQ74 OX=1913579 GN=menF PE=3 SV=1
MVTTVQRTFRKEVLHALHKAKEVNHAVLISYSRQIESLDPLSFFNYRAKKYTGNRFFWSDPESELTIVGLGKEAVFQTNQKNSERYREVFEQWERFKKTAFHIYEEEKLQHSAVGPVLFGGFSFDPCEERGSQWDHFSEGDFFVPALMLTMTAEGPFLTVNRWVKGEEDAEAVLEGLQAFAAEFMIPGFKQEDQAVIAEVQELDKDDWLKAIETATSQIKEKQYDKVVLARELLLTFDGPIQIEPVLKALLNDQQTSYVFAIEKEGKTFVGASPERLIKRDGSTVMSTCLAGSIKRGVNEEEDRRIGLELLNDEKNLLEHDIVVSMIHNAFESACSEVEKSDGPVLYKTKSVQHLFTPIVGQLRDSASIFDLIEKLHPTPALGGAPKEKAVEVIREIEPMTRGWYAAPIGWIDSQDNGEFAVAIRSGLIEGSTARLFAGCGIVEDSEPISEYEETQIKLKPMISALGGERR

SEQ ID NO: 93412 - protein, 468 aa, Bacillus sporothermodurans
  misc_feature (1)..(468): tr|A0A150KKK2|A0A150KKK2_9BACI Menaquinone-specific iso chorismate synthase OS=Bacillus sporothermodurans OX=46 224 GN=B4102_4161 PE=4 SV=1
MKMEQMDIVDEYKIALTKAKNKNKTLLFSYTEQLNNIDPLSFYSSAKAIFQVERFFWKVPNDEMIIVGLGSAHTFQTEVGEGRFEYIEREWNQFIHDAHVYNPFDVQGTGPVIFGGFSFDPLSMKESEWTPFYNALFHLPKLMLIINKQEVFLTTNILCHSNDNLDKLNHHLKLKREIFEGKVSKSIENINIKQEHELNQQAWIDSVAEVVDLLKKEKKLNKVVMARKMNIEFNDKVAAEKVLENLWEEQHESYIFALETENSCFTGASPERLVKKNGNTIVSACLAGSIKRGNSISEDEALAEALFNDEKNRHEHQLVVSMIAEIIRKYCLNVDIPELPSVMKMRDIQHLFTPVNGIIKDDHISIFPLVKDLHPTPAMGGVPTIEALQIIREKEKMDRGFYASPIGWVDYRGNGEFAVAIRSGLIKENEAFLYAGCGVVSDSNPEDEYFETKIKFRPMLRALGGKKL

SEQ ID NO: 93413 - protein, 518 aa, Bacillus stratosphericus
  misc_feature (1)..(518): tr|M5R124|M5R124_9BACI Isochorismate synthase MenF OS=B acillus stratosphericus LAMA 585 OX=1236481 GN=menF PE= 3 SV=1
MFSLLSSSVKVYNRKAGHSTYSNVHVFFYMMVLFLYVISWILEECIMVTTVQSTFRQEALATLEEANNVNHAVLISYSRRVDDLDPLAFFQSGEADFLGERFFWSDPESQMIFSGLGRAAVIKSSEQGKERFNLVHQEWEQLKQHMFHFHDEKELKQAAVGPLLFGGFSFDPYEEKARHWEAFGEAHFFVPSMMLTVSKEGTFLTINEWNEVDGNVHQLIQELEQKASNFDALPVRNHGQAELVHMEELDVQEWMKAIHEATEHIRVNEYEKVVLAREVLLHYKNQIELAPLLAELLKHQTTSYVFAIEQGRQAFVGATPERLVKKSGGEVFSSCLAGSIVRGQDEVEDQALGEELLHDEKNLIEHQIVVNMIEQAFEANCHHVHKPNQPSLYKTKNIQHLFTPIVGEIKSSCSLFSLIEQLHPTPALGGYPKEKAVEVIREIEPLKRGWYAAPVGWIDSKDNGEFAVAIRSGLIEEDQVRLFAGCGIVEDSLAKQEYEETQVKLRPMLSALGGRPIE

SEQ ID NO: 93414 - protein, 468 aa, Bacillus subterraneus
  misc_feature (1)..(468): tr|A0A0D6Z8L9|A0A0D6Z8L9_9BACI Isochorismate synthase M enF OS=Bacillus subterraneus OX=285983 GN=menF PE=3 SV= 1
MVAIQETELKQGIFNGIARAKGRSQSILVSEVHKIEHLDPVDFFAAGREKYLGERFFWKDPEGKLVLAGLGICGQIQSDQAADRFFHVEKEWKRFMDSALIINKYQRNGMGPTLFGGFSFDPQKQGTALWSKFPEALFQIPKYMLTLSNGEMFLTTNVICTHHDDLTLFEKVSRERQEVLSKAAMKQSFAQPKLKKMVEIEPEAWKQAITHVVKDLKQSELKKVVLARELRLHFDEEVQAERVLVNLLDHQNDSFTFVLESNNDCFIGASPERLVKKEGKSLYSACLAGSIARGNTPEEDDRLGSELLSDQKNLMEHQYVVEMIKEAMEETCNEVLLPEQPVLMKMKYIQHLYTPVIGKNRAGTSILHLVNRLHPTPALGGLPKQAAIEKIREMEQLDRGLYAAPVGWMDYQGNGEFAVAIRSGLIQGKEASLFAGCGVVADSNAESEYKETSIKFRPMLTALGGKIT

SEQ ID NO: 93415 - protein, 471 aa, Bacillus subtilis
  misc_feature (1)..(471): sp|P23973|MENF_BACSU Isochorismate synthase MenF OS=Bac illus subtilis (strain 168) OX=224308 GN=menF PE=3 SV=2
MVTTVQRTFRKEVLHALHKAKEVNHAVLISYSRQIESLDPLSFFNYGAKKYTGNRFFWSDPESELTIVGLGKEAVFQTNQKNSERYREVFEQWERFKKTAFHIYEEEKLQHSAVGPVLFGGFSFDPCEERGSQWDHFSEGDFFVPALMLTMTAEGPFLTVNRWVSGGEDAEAVLEGLKAFAAEFMVPDFKQEDQAVIAAAEELDKDDWLKAIETATSQIKEKQYDKVVLARELLLTFDGPIQIEPVLKTLLDDQQTSYVFAIEQEGKTFVGASPERLIKRDGGTVMSSCLAGSIKRGVNEEDDRRIGLELLNDEKNLLEHDIVVGMIHNAFVSSCSEVEKPDGPVLYKTKSVQHLFTPIVGQLRESASIFDLIEKLHPTPALGGSPQEKAVDVIREIEPMSRGWYAAPIGWIDSQDNGEFAVAIRSGLIEGSTARLFAGCGIVEDSEPISEYEETQIKLKPMISALGGERR

SEQ ID NO: 93416 - protein, 474 aa, Bacillus swezeyi
  misc_feature (1)..(474): tr|A0A5D4Q948|A0A5D4Q948_9BACI Isochorismate synthase M enF OS=Bacillus swezeyi OX=1925020 GN=menF PE=3 SV=1
MVTTVQRTFLREEPEALNVVKQVNHAVLISYSRKIEGLNALSFFKSGEEKYAGNRFFWSDPDGEMTLVGLGKEITVSTDQKDAGRYRDIHEKWERLKEKAYHFHEGERRSQTPAGPLLFGGFSFDPLEERDQHWNGYQEGAFFIPSVMLTQEREESFLTLNQWKAPNEDVRFVLAHLKAAASQILKQNVLQENEKGHPLCVSREELHLPQWFDAIRQATDEIKTGKYDKVVLARETLLTFNKPVQLHDVLFNLMSEQKTSYIFAIEENGKSFVGASPERLIKKDADKVLSTCLAGSIKRSENEQEDRMLGLELLNDEKNLIEHDIVVNMIFKAFLSNCSQVKKPDMPGLYKTKNVQHLYTPVVGKMNEESSLFHLIEQLHPTPALGGAPQQKAVEVIRNIEPMSRGWYAAPAGWIDMRGNGEFAVAIRSGLIESKEARLFAGCGIVADSDPALEYEETQMKLKPMLSALGGDTR

SEQ ID NO: 93417 - protein, 465 aa, Bacillus taeanensis
  misc_feature (1)..(465): tr|A0A366XYV1|A0A366XYV1_9BACI Isochorismate synthase M enF OS=Bacillus taeanensis OX=273032 GN=menF PE=3 SV=1
MVGIQQHELHNLLVQGVERACKQNTTVLVSHTIEVKTPVHPFSFFTSGSHYKGSRSFWSDPTGEFQLVGLGTCIALNSNFSKRFRGVEKEWKELLQSSIIHAPNNEPGTGPTLIGGFSFDPLKPKTELWRCFPDTRMTLPTFMLTVNKEKTWLTINALLDEENHPSTIANQLMKEQEMLLKNTDITLPEPAPFYIEEIVPQEWMRTVEKTAKQIQEGIIEKLVLAREVRIHSEEVLSAESILFTLYHQQPQSYLFAFESENDCFLGASPERLVKREGDRFLSTCLAGSIRRGVSKEEDIQLGESLLNDEKNRHEHQLVVDMIKEAMVAVCEEVYAPTEPILYKARDIQHLYTPVTAKADNHSLLAVVEQLHPTPALGGYPQKEAVKKLREMEKLDRGWYAGPIGWIDYRQDGEFAVAIRSGLLQGKEASLFAGCGIVGDSDPLSEYKETQIKLQPMLSALRGNHS

SEQ ID NO: 93418 - protein, 398 aa, Bacillus tequilensis
  misc_feature (1)..(398): tr|A0A2X0X6B8|A0A2X0X6B8_9BACI Isochorismate synthase O S=Bacillus tequilensis OX=227866 GN=dhbC PE=4 SV=1
MLEQNVLSQTKAEHLLHEYRAGAFFLASPHRVLLAKGVREIVPEADGQNQIETLSGRIAETLNQAKQSGQSRPLVVGAVPFDHVKAARLVVPEEVSWSGPLQFDHAEKELQTEYTYHIEPVPAPEDYKYGVEQGLAHIADGILSKIVLSRSLHLTSSEPIQTDELLHHLARHNTHGYTFAADVSSEAETSSSRTLLGASPELLVSRMGTQVVSNPLAGSRPRSDDPAEDQRRAAELLSSAKDLHEHAVVADAVAAALRPFCRTLDVPEKPSLIKTETMWHLSSVIKGELSDPSVTALELAAALHPTPAVCGTPTDLAREAILSIEPFDRGFFTGMVGWCDDAGDGEWIVTIRCAEAEERSLRLYAGAGVVAGSKPEDELQETSAKFRTMLRAMGVKHI

SEQ ID NO: 93419 - protein, 463 aa, Bacillus terrae
  misc_feature (1)..(463): tr|A0A429X0Y2|A0A429X0Y2_9BACI Isochorismate synthase O S=Bacillus terrae OX=1914933 GN=D5F11_024275 PE=4 SV=1
MLINSPYQTKYINTLKHKAQSNKVLASYTKKVDKIDPFTFYQISKPANDGKRFFWKSPDDDTTIVGVGLLRSFSNSGAEDRFRRIETEWKEILSSAVIDNPFHLPGTGPLLFGGFSFDPYSLKEEKWQPFGDALFYLPEYMLTVIGEEYYLTVNLFESEELVNQSNKVKNFDLIIKNAGLSEASASYLISKEELFVPQWLDSVAEVVNILKSSDLVNKVVLSRQMQLNFSEPVLSEYVLKQLHTQQKDSFIFLLETPEGSFAGASPERLVKKIDDQVLSTSLAGSIGRSENAVEDRELGNILLNDEKNLYEHSLVVDMIKKALKPHCNELQVPDQPILLRTPYIQHLYTPVSGVAKPETSIFNLVGELHPTPALGGVPTGQAMKIIRDEEKMDRGFYASPIGWTDFDGNGEFIVAIRSGLLKGKQAFLYAGCGLVADSDPKEELKETGIKFQPMLQAIGGKSE

SEQ ID NO: 93420 - protein, 465 aa, Bacillus thermoamylovorans
  misc_feature (1)..(465): tr|A0A0D0FWM1|A0A0D0FWM1_9BACI Menaquinone-specific iso chorismate synthase OS=Bacillus thermoamylovorans OX=35 841 GN=B4064_2643 PE=4 SV=1
MLLAENQAIAHSNIIKQLETKQKTLFSLMTPIDPFDPVVFYKQGTPITEGKRFFWKSANEDFYLVGVGAALLFSNLAKKNRFDDIHQFWKDIVQNAEIEGSSIIGTGPLLFGGFSFDPDTGKEQEWSDFGDTFFYLPKYMLTIVNGQHFLTFNQIMDPAGENKTSLYKHIEEYMNDLLARQSTVAVEQVSMTSCTEIGQAEWVKAVEEIVNLLKSTDIKKVVLARKMIIEFSKSPSIATVLEQLRRNQPGSFTFALESGSSCFLGASPERLVKKTGEEVLSTCLAGSAPRSKDPGEDEWLGKNLLNDAKNRYEHQLVVNMIKNALNPICTNLIVPEEPILMKTPAIQHLYTPITGRAKAGQSIFKMVERLHPTPALGGVPTIEALRIIREKEKMDRGLYAGPIGWTDFRGNGEFIVGIRSGLIQNNNAILYAGCGLVPDSNPQDELIETRIKFRPMLHALGGEEK

SEQ ID NO: 93421 - protein, 1027 aa, Bacillus thermocopriae
  misc_feature (1)..(1027): tr|A0A410XMD1|A0A410XMD1_9BACI Multifunctional fusion p rotein OS=Bacillus thermocopriae OX=1215031 GN=menF PE= 3 SV=1
MVTLYQNKVIDQLRHVLGKKEHMVSITIRMEQIDPLAFFSAGETLFYGQRFYWSDCLHERTFVGLGRAQVIKSKEKTKKRFRDVEREWKQIVEGAFIEGQGPLMFGGFAFDPLKQSDEHWIEFPSAQFVVPTFLLTKQRDEIWLTVNVVHESLNQIEEMIDSLFHTRDESDWHRAHIVKKEEVARAQWLRAVHYATDLIRNDAIEKVVLARKLFLSFSDRINCSQVLHELHEQQPMSYIFAFENGSTCFIGASPEQLVRKNGHMCETACLAGSIRRGHTVKEDEELGRWLLQDDKNRREHAFVVNMIKQAMNEVCTEVVIPNEPTLLKMRHIQHLYTPVQAKVKEGVSIFSLVERLHPTPALGGFPKEKAVQTIREIEPLDRGWYAAPIGWVDANGNGEFAVAIRSALLEDNKAHLFAGCGIVAHSDPHNEYEETNVKFKPMLSALGGMEMNEMTAYVTAFVEQLAHMGVQQVVISPGSRSTPLAMVMAEHPTLNIHVHIDERSAAFFALGMAKASGEPVALVCTSGTAVANYYPAIVEAYYARVPLVVITADRPHELRDVGAPQAINQLHMYGSYVKWFVDMALPEGNERMLRYAEMVAARAVYVASSVPKGPVHINVPLREPLVPTIDEPLFLPSSPTRIVYKGNKHLCEEMIDELYAELSGVEKGVIICGDLHIEGFSEAVVKLAEALQYPILADPLSPLRTGTHEKRCIIESYDAMLKNETFADKFVPDVVIRFGAMPVSKSLYVWLQKHKQVKQIVVDEAGQWRDPTLSLQVLIEANEVQFCYDLAQRASHSFRSSQWMSKWQYMNERAKHILLKAEEETSMFEGKIFIELANLLPDKATLYVGNSMPIRDADTFFMSSNKRIRLLANRGANGIDGVVSSALGASYVSQPLVLVIGDLSFYHDLNGLLAAKLQQLHATIIVLNNNGGGIFSFLPQANEPKHFERLFGTPTHLSFQHAVDMYNGHYEKVETWEHFRRAMTDALSRPTLNVIEVPTSREYNVKIHRKLWKDVSQEMSNLLNKGE

SEQ ID NO: 93422 - protein, 399 aa, Bacillus thuringiensis
  misc_feature (1)..(399): tr|Q6HJ05|Q6HJ05_BACHK Isochorismate synthase OS=Bacill us thuringiensis subsp. konkukian (strain 97-27) OX=281 309 GN=entC PE=4 SV=1
MNEFTAVKELSEKLLEDYKTESSFFFASPTRTILAEGEFTTVKHHEIESFPELVQAVLRNAKQAGNPNPIVVGALPFDRRKEVQLIVPEYSRISERLQLDTTNHLEINRNLTFEMTPVPDHEVYMNGVKQGIEKIKDGDLKKIVLSRSLDVKSSGKIDKQKLLRELAEHNKHGYTFAVNLPKDENENSKTLIGASPELLVSRHGMQVISNPLAGSRPRSDDPVEDKRRAEELLSSPKDLHEHAVVVEAVAAALRPYCHTLHVPEKPSVIHSEAMWHLSTEVKGELKNPNTSSLELAIALHPTPAVCGTPMEEAREAIQQIEPFDREFFTGMLGWSDLNGDGEWIVTIRCAEVQENTLRLYAGAGVVAESKPEDELAETSAKFQTMLKALGLNDSSLNEK

SEQ ID NO: 93423 - protein, 463 aa, Bacillus timonensis
  misc_feature (1)..(463): tr|A0A4S3PZ19|A0A4S3PZ19_9BACI Isochorismate synthase M enF OS=Bacillus timonensis OX=1033734 GN=menF PE=3 SV=1
MIQQKGLSDYIKKGINRSKELSRPVLISQVKEMKNIDPLLFFAAGKRTPFETRSFWSNPTNDTIIVGLGEAYTISDNESTERFEAIEKQWKRLVQHSIIVDDFAPYSTGPILMGGFSFDPLKKRTELWDYFDDAKFVLPVIMLSYYKGSTYLTTNIICEPNGTTFGGSDLEQLEVLLKENYKYQKNHSFTKEEVQPQEWMDSVRNATKKVQNGEVEKVVLAREIKLHFDEPIEADAVLARLKEEQPMSYLFAIEYKNSCFIGASPERLIKKKGEEFLTTCLAGSIRRGKTPSEDKQLENELLHDPKNLHEHDVVVQMIKNAMKESCSSITSPTHPGILKMRDIQHLYTPVKGVAKDDVSLLTVVNRLHPTPALGGQPKQKAFEIIRELEILDRGWYGSPVGWFDTNDNGEFAVAIRSGLLNGNNASLFAGCGIVGDSQPESEYTETMIKFRPMLSALGGLYNE

SEQ ID NO: 93424 - protein, 399 aa, Bacillus toyonensis
  misc_feature (1)..(399): tr|A0A2A8HAB9|A0A2A8HAB9_9BACI Isochorismate synthase O S=Bacillus toyonensis OX=155322 GN=CN585_22005 PE=4 SV= 1
MNELTAVKELSEKLLEDYKTESSFFFASPTRTILAEGEFTTVKHREIESFPELVQATLSNAKQAGNPNPIVVGALPFDRRKEVQLIVPEYSRISERLQLDTTNQLETNENVTFEMTPVPDPEVYMNGVKKGIEKIQDGDLKKIVLSRSLDVKSSEKIDKQKLLRELAENNKHGYTFAVNLPKDENENSKTLIGASPELLVSRSGMQVVSNPLAGSRPRSDDPAEDKRRAEELLSSPKDLHEHAVVVEVVAAALRPYCHTLHVPEKPSVIHSEAMWHLSTEVKGELKNPNTSSLQLAIALHPTPAVCGTPMEAAREAIQKIEPFDREFFTGMLGWSDLNGDGEWIVTIRCAEVQENTLRLYAGAGVVAESKPEDELAETSAKFQTMLKALGLRDNSLNEK

SEQ ID NO: 93425 - protein, 464 aa, Bacillus tropicus
  misc_feature (1)..(464): tr|A0A4Y6F085|A0A4Y6F085_9BACI Isochorismate synthase O S=Bacillus tropicus OX=2026188 GN=FJR70_18255 PE=4 SV=1
MIQTKQIGLQEVLSAAIKRATDEKIMVSFVKQIDWMDPLLFYAAGKRIAFENRCYFADPAQHVIFAGIGSVFTIATASHKRFQTARDEWDKVKEKAYVQRERYEFGTGPLLFGGFSFDQEKEKTDLWKEFDDTTFSLPAFLLTVKNEKAWLTMNTFVSATDCAETLYNKIVSLEEKILEESKCALQGSKLTVTSKVEVDPKGWMKAIEKVQDEMKQGNVQKVVLARELKVEMDHHIDSALVLEALRIGQPDCYVFSFDYKGACFLGATPERLIRKEDEKFTSMCLAGSTGHGQSIEESKRNSNALLHDEKNLAEHGYVVNMIRSVLNEHCEYVNIPESPGLLTTKNLIHLYTPVEAKGTASLLTMVEELHPTPALGGTPRLEAMKLIRDVELLDRGLYGAPIGWIDDEGNGEFAVALRCGLLNGEKASLFAGCGIVIDSVPQLEYEETSLKFRPMLGALEELMK

SEQ ID NO: 93426 - protein, 470 aa, Bacillus vallismortis
  misc_feature (1)..(470): tr|A0A1W6HLR3|A0A1W6HLR3_BACVA Isochorismate synthase M enF OS=Bacillus vallismortis OX=72361 GN=menF PE=3 SV=1
MVTTVQHTFREEADHALHKAKQVNHAVLLSYSRRIASLDPLSFFKDGAKKYKGKRFFWSEPGSELTIVGLGTEALFQSNEKNGKRYHDVFEQWERFKKTAFHIHEEEAAHTAVGPVLFGGFSFNPAEERGDEWNGFEEGLFFIPSLMLTKTADGDYLTVNQWAADGNQAEDTLKRLKSFSEAFSVSSIEYEEYPVLTKAEELDVENWLEAIKTATNDMKANQYDKVVLAREVVLSYDGPIPTESVVRKLLKDQTTSYVFAIEQGDKCFVGASPERLIKKSGKDVMSTCLAGSIKRGENQQEDDRLGKELLHDEKNLAEHDFVVQMIHDSFLSSCSDVKKPAGPQLYKTKSVQHLYTPITGHLKTSASLFDLIEKLHPTPALGGAPQQKAVEVIADIEPMTRGWYAAPIGWMDGRENGEFVVAIRSGLIEGKNARLFAGCGIVEDSDPQSEYEETQIKLKPMISALGGERL

SEQ ID NO: 93427 - protein, 471 aa, Bacillus velezensis
  misc_feature (1)..(471): tr|A0A563AHW5|A0A563AHW5_9BACI Isochorismate synthase M enF OS=Bacillus velezensis OX=492670 GN=menF PE=3 SV=1
MVTTVQHTFREEADHALHKAKQVNHAVLLSYSRRIASLDPLSFFKDGAKKYKGKRFFWSEPGSELTIVGLGTEALFQSNEKNGKRYHDVFEQWERFKKTAFHIHEEEEAAHTAVGPVLFGGFSFNPAEERGDEWNGFEEGLFFIPSLMLTKTADGDYLTVNQWAADGNQAEDTLKRLKSFSEAFAVSSIEYEEYPVLTKAEELDVENWLEAIKTATNDMKANQYDKVVLAREVVLSYDGPIPAESVVRKLLTDQTTSYVFAIEQGDKCFVGASPERLIKKSGKDVMSTCLAGSIKRGENQQEDDRLGKELLHDEKNLAEHDFVVQMIHDSFLSSCSDVKKPAGPQLYKTKSVQHLYTPITGHLKTSASLFDLIEKLHPTPALGGAPQQKAVEVIADIEPMTRGWYAAPIGWMDGGENGEFVVAIRSGLIEGKSARLFAGCGIVEDSDPQSEYEETQIKLKPMISALGGERL

SEQ ID NO: 93428 - protein, 468 aa, Bacillus vietnamensis
  misc_feature (1)..(468): tr|A0A0P6WRR7|A0A0P6WRR7_9BACI Isochorismate synthase M enF OS=Bacillus vietnamensis OX=218284 GN=menF PE=3 SV= 1
MVTIHKTNIEKAYDTARMKAKQIHRPVLLSIVEEVDAVDPLSFYYGGNSFHGERFLWKDRDHTVTLVGLGAAHILSTDEKEERFFTVENEWKRFIEESVIVTGDKWAGTGPLLYGGFRFDPMNTNSEEWNDFSAGTFQLPMFMLTKPEKTNYLTMNVICHPDEDDSLFHERIGLKEELLANARKAFIPERPEWIGTRDVKPEEWKESVQSVVNRLQKGEMDKVVLARKCEVSFDQQVSSDFVLDNLWKQQPDSFVFSFEWEGSCFIGATPERLVKKTGEEILSTCLAGSIARGDTLESDEKLGEELLGDEKNRYEHHLVVDSIQHALHPFCDTLSIPSSPQLMKLKDIQHLYTPVIGQASEHTSLLNLVEKLHPTPALGGVPRDKAMHVIRQEEDMDRGLYAAPIGWIDAYGNGEYAVALRSGLLQGDKAYLYAGCGIVADSEPESEFKETQMKFRPMLRALGGTVHD

SEQ ID NO: 93429 - protein, 466 aa, Bacillus weihaiensis
  misc_feature (1)..(466): tr|A0A1L3MNN7|A0A1L3MNN7_9BACI Isochorismate synthase M enF OS=Bacillus weihaiensis OX=1547283 GN=menF PE=3 SV= 1
MITTLDDTMKEHIEQALEEAKQTNQSVIVSRVKEVDAINPLHFYASGEKLFFGERFIWSTPERDFTLIGLGKEHVFENNKTSERFSDIESEWKRLNKKIVSNYTQQLGTGPLLFGGFSFDPSKEKNTLWQNFPEAKFVLPTMMLTRLNHKTFITVNRMITPYDQLDDCIKHFEQTLEVSFHPIDCEKVNEFSEIEYQTSQWLKAVEKATNDIKEEKIDKVVLAREVHLKFTEEINSNNVISRLQKEQPTSFIFGLENGNQNFVGATPERLIKKVDQEVSSTCLAGSIKRGKTKKQDLVLGEQLLNDRKNLIEHTIVVKMIKEALNECCYEIISPKAPALLKTKSIQHLYTPVKGYIKKGNSLLSLVDKLHPTPALGGFPKQKAIEKIRELEPMHRGWYAAPIGWIDHEDNGEFVVAIRSGLLEGHNAALFAGCGVVAESDPKSEYLETKIKLKPMLSALGGLENEW

SEQ ID NO: 93430 - protein, 464 aa, Bacillus wiedmannii
  misc_feature (1)..(464): tr|A0A4U2VAV5|A0A4U2VAV5_9BACI Isochorismate synthase O S=Bacillus wiedmannii OX=1890302 GN=FC696_02435 PE=4 SV =1
MIQTKQIGLQEVLSAAIKRATDEKILVSFVKQIDWIDPLLFYAAGKRISFENRCYFADPAQHVIFAGIGSVFTIATSSHKRFQTARDEWDKVKEKAFVQRERYEFGTGPLLFGGFSFDQEKEKTDLWKEFDDTTFSLPAFLLTVKNEKAWLTMNTFVSATDCAETLYNEIVSLEEKIFWESKCALEGSKLTVTSKVEVDPKGWMKAIEKVQDEMKQGNVQKVVLARELKVEMDHHIDSALVLEALRIGQPDCYVFSFDYKGACFLGATPERLIRKEDEKFTSMCLAGSTGHGQSIEESKRNSNALLHDEKNLAEHSYVVNMIRGVLNEHCESVNIPESPGLLTTKNLIHLYTAVEAKGDASLLTMVEELHPTPALGGTPRLEAMKLIRDVELLDRGLYGAPIGWIDDEGNGEFAVALRCGLLNGAKASLFAGCGIVIDSVPQLEYEETSLKFRPMLGALEELMK

SEQ ID NO: 93431 - protein, 472 aa, Bacillus xiamenensis
  misc_feature (1)..(472): tr|K2NHM3|K2NHM3_9BACI Isochorismate synthase MenF OS=B acillus xiamenensis OX=1178537 GN=menF PE=3 SV=1
MVTTVQRTFRQEALATLEEANNVNHAVLISYSRRVDDLDPLAFFQSGEADFLGERFFWSDPESQMIFSGLGRAAVIKSSEQGKERFDIVHQEWEQLKQHMFHFHDEKELKQAAVGPLLFGGFSFDPYEEKARHWEAFGEAHFFVPSMMLTVSKEGTFLTINEWNEVDGNVHQLIQELEQKASNFDALPVRHDGQAELVHMEELDVKEWMKAIHEATAHIRANEYEKVVLAREVLLHYKNQIELAPLLAELLKHQTTSYVFAIEQGRQAFVGATPERLVKKSGGEVFSSCLAGSIVRGQDEIEDQALGEELLHDEKNLIEHQIVVNMIEQAFEANCHHVHKPHQPSLYKTKNIQHLFTPIVGEIKSSCSLFSLIEQLHPTPALGGYPKEKAVEVIREIEPLKRGWYAAPVGWIDSQDNGEFAVAIRSGLIEEDHVRLFAGCGIVEDSLATQEYEETQVKLRPMLSALGGRPNE

SEQ ID NO: 93432 - protein, 467 aa, Bacillus zeae
  misc_feature (1)..(467): tr|A0A398B5P9|A0A398B5P9_9BACI Isochorismate synthase M enF OS=Bacillus zeae OX=1917180 GN=menF PE=3 SV=1
MVTIQETELREGILSAIRLAKETVQPVLVSEVQKIADIDPFSFFNAGREQFLGERFFWKDPDSRHIIAGLGNCRLIQHDGVRGRFTKTEKEWNRFIETAVILDEYKTSGTGPLMFGGFSFDPLKEKTGLWSKFSDSHFHVPKYMLTVAGGQAYFTSNVICTQHDDADLYEKVLQERQIILLAQKQPVLPMPALQEVIEIAPEEWKESVSELVRELKDSPLKKVVLARELRLRFSKAAEAESVLFRLLKEQQGSFIFAFESNGDCFIGATPERLVKKEGNSVFSACLAGSIGRGADSDSDEKLGRSLLEDQKNLIEHQYVVDMIREAMEETCDEVIIPATPQLMKMKYIQHLYTPVIGKNRRGTPIFSLVDRLHPTPALGGLPKKLAVEKIREMERLDRGYYAAPLGWLDHNGNGEFAVAIRSALLQGEEASLFAGCGIVADSDADSEYRETSIKFRPMLNAFGGNNL

SEQ ID NO: 93433 - protein, 472 aa, Bacillus zhangzhouensis
  misc_feature (1)..(472): tr|A0A081L6H6|A0A081L6H6_9BACI Isochorismate synthase M enF OS=Bacillus zhangzhouensis OX=1178540 GN=menF PE=3 SV=1
MVTTVQSTFRQEALATLEEANNVNHAVLISYSRRVDDLDPLAFFQSGEADFLGERFFWSDPESQMIFSGLGRAAVIKSSEQGKERFDTVHHEWEQLKQHMFHFHDEKELKQAAVGPLLFGGFSFDPYEKKARHWEAFGEAHFFVPSMMLTVSKEGTFLTINEWKQVDGNVHQLIQEVEQKASRFETLPVRTDGQAELVHMEELDVTEWMKAILEATEHIRANEYEKVVLAREVLLHYKNQIELAPLLAELLKHQTTSYVFAIEQGRQAFVGATPERLVKKSGEEVFSSCLAGSIVRGKDETEDQALGEELLHDEKNLIEHQIVVNMIEQAFEANCHHVHKPNQPSLYKTKNIQHLFTPIVGEIKSSCSLFSLIEQLHPTPALGGYPKEKAVEVIREIEPLKRGWYAAPVGWIDSQDNGEFAVAIRSGLIEEDHVRLFAGCGIVEDSLAKQEYEETQVKLRPMLSALGGRPIE

SEQ ID NO: 93434 - protein, 457 aa, Bacteriovorax sp.
  misc_feature (1)..(457): tr|T0DIJ1|T0DIJ1_9PROT Isochorismate synthase OS=Bacter iovorax sp. BAL6_X OX=1201290 GN=M902_2949 PE=4 SV=1
MRLSANNLQIDIINALIKLDCSSEDLIKGSEYSLYKFEAGFNNISSIIDHFQTFKKFYFLNKDKDTEILALGSWRDFNSLYHYEDIERLIESHEFLKICGAQRFKAEADSLEWHGLEDCSYFIPKVLIESTPQGVDINVILPNSFFADEQNKKQVLHELAITLDPNPKHTLTDYNHITKSISETSKNQWNKIVKAAVSKINRSQISKIVLSRKLKVSFKNPISSYGQFKTLKENNSHNSYNILFQFSPHQCFYSVTPETLFKLDGRKIFIDSLAGTTKRGANKQEDDALEQTLLTNTKELEEHRHVSSYIEDTLANLASDIEITKKEQILKLKYIQHIHTKYEGVLNENAKRSDLITYLHPTPAVAGLPKPLAIELISELETNSRGLYAAPIGYFSKDKTEFAVGLRCALVDKTDLHIYAGCGIVKDSSAEKEWNETTNKMKNFTEVIKAKSWTNFH

SEQ ID NO: 93435 - protein, 463 aa, Unknown
  misc_feature (1)..(463): tr|A0A3A9FY86|A0A3A9FY86_9BACT Isochorismate synthase M enF OS=bacterium 1XD42-44 OX=2320106 GN=menF PE=3 SV=1
MIEVQDQQVEKLLRDAIHQMPLTKETQLVSITKRVEPKDPVLFFAAAAKLNKERCFWTSTKDSFSIVGVGNVFEISANQDRFHYTEITWKKLLDDVRIYNPFQAPGTGLVSLGGLDFDPQKPRTELWADFPRAKFTVPEYMLTKNMEDVYFTINLKIRKDDHPVQLMKAIEDVERMLFQASKDPHGVPHLVNSKVIAPEQWKQTVQKAKQEIQQKQMDKIVLARELRLQFSKQVNISHILGDLIKKQSNSYVFAFEQHNSCFVGATPERLVKVDKQELLSTCLAGTAPRGKTEVEDQQMADNLLHDQKNREEHEFVVQMIKQGLNKYCTDVHIPDTPVVYPLKNLQHLYTPVTGRLKDGFTIFNVVKELHPTPALGGVPRDLSMRFIRDYERLDRGWYGAPVGWLDSNDHGEFAVAIRSALIQEDEASLFAGCGIVKDSNPEEEFEETRIKFFPMLTVLGGQA

SEQ ID NO: 93436 - protein, 429 aa, Unknown
  misc_feature (1)..(429): tr|A0A1V5JBG2|A0A1V5JBG2_9BACT Isochorismate synthase D hbC OS=bacterium ADurb.BinA028 OX=1866933 GN=dhbC PE=4 SV=1
MSTLHGPARAASGTVAPLVVRTVEIGDPGPLLALLPPAEQPGDVLSWVRRGEGLVGWGQAATFTTAGPERFADADRWWRHTAARAVVRDEVGMPSSGLVCFGSLPFADDSADRASFVVPRVSVGHKGSRWWVTTVGDVPTLAVTPAPTDDPLPPRNVAFADGALSSTAWAARVAEAVARINAGDLDKVVLARDLIVQADAPIDPRWVLRALADRYDNTWVFSVSGMVGATPELLVRRERGLVTSRVLAGTIRRTGDDAKDLSLAASLARSSKDLEEHEYAVRSVADALAPHCSSMNVPESPFVLHLPNVMHLATDVTGVATDDASSLALAASLHPSAAVGGTPTPLAVALIAELEDMDRGRYAGPVGWMDAKGDGEWGIALRSGRYVDGDPASLRIFAGCGIVAGSDPDGEVSEADAKFVPMRDALSGR

SEQ ID NO: 93437 - protein, 454 aa, Unknown
  misc_feature (1)..(454): tr|A0A1V5GWY2|A0A1V5GWY2_9BACT Isochorismate synthase E ntC OS=bacterium ADurb.BinA186 OX=1866934 GN=entC PE=4 SV=1
MLSSRLSDAHTVRDAAKVLLSWLKNAPLNGSHNLSLKINVEHPSEQEFFSPEGCQRIYFKSRDCDLEWWGLGAAESLFQSSVHDQSVLSQVVKKSHFLDDDQIYFGGIKFDKDRVVDDEWKDFQYEIFILPLLLMHHSAEGFTLSLNYRSDGLPYVVWRDHAESILSSIINRKGVVEHKKYTYSDYQCPGETNYYSTIKRALLLLGSHSDYKKVVIGRRTTRSLSMPFDPVQLFFRLKRAPHAFLFMFDSGQGSTFFGASPELLYRRIGQNFETESLAGTRARSLNRDIDEQLRQELLESSKDKSEHFFVSNHIEDRLREFGISDLFTSKIEIMALPFVQHLHRRYHGRIEHGLSDDKIMTALHPTPAVCGINSLWAKQFIREHEGFDRGFFAAPIGYIGKNSAEFAVAIRSALYRASELHIYAAGGIVPGSIPEQEWEELNNKQKNILSIFDE

SEQ ID NO: 93438 - protein, 463 aa, Unknown
  misc_feature (1)..(463): tr|A0A2H6EQX0|A0A2H6EQX0_9BACT Salicylate biosynthesis isochorismate synthase OS=bacterium BMS3Abin04 OX=20057 12 GN=pchA PE=4 SV=1
MKDLLKKFRLFNDSFKNRTGFNNTVSGFRSFAYRIKTINFSFLLNNFNSEDYFYWSVSDNNLSMLGIKSVFDIKISGLDRIEKTDSKILQIENNVESNWHEVGLNFPPMFLGGMKFVPNEQGNVWNDFSDSDWMLPKFLFYKNNSEYFLIINYKSSTYDDSVLENEILEITDFLTQTTNPAEQKNIQITSTIVHNGWNNKVLNALKSIHEGAIQKIVLSREVEWELSGVPNIYSLIQKLGKRYPKCYVFAFRRNNSVFFGASPEKLAKIQNGWIETDALAGSISRSPNPKEDLKLEKELLSSEKNLNEQDAVVKFITGSLSKISDNIEFDEKPIIRKLPNIQHLWTPIRAKLNKELKLFSILKNLHPTPAICGAPWLNALQSITMMEEHDRGLYAGIVGWFCLENKAEFAVAIRSALLKDKKVYGYAGCGIVEGSDPDAEYEETELKLKPIKNLFVNEKSRQS

SEQ ID NO: 93439 - protein, 434 aa, Unknown
  misc_feature (1)..(434): tr|A0A2H6EUF9|A0A2H6EUF9_9BACT Isochorismate synthase M enF OS=bacterium BMS3Abin05 OX=2005713 GN=pchA PE=3 SV= 1
MKEPQVSKNKGIVRFEIPVTDINPLDWLAWQDQAFKTYWSTGDGQFEMAGAGTADLISGDESFQFKTLLDRIHKNLAASSTGVRYYGGTRFDGKQKAGTSWQRFGAYAFVVPQFEVVRRKDELRFACNFRNNGENGFQKIQSALQKIRFEHTEKRPKEIILIDRKDLPAKIDWVKDIKRALREFNSGKLQKVVLARKSVFRFSQNLEPLSLLKALKNANPRAFHFYFQPENKLAFLGATPERLYHRLGREIRSDAVAGTRPRGKTAQEDAHFRHELLSSDKDRREHEFVFQWVRDVLTKMCETLQFDSKATIIQQPAVQHLHRHFNGVLRESISDGDLLAGLHPTPAVGGFPTKLAMENIARNEPFDRGWYAGPVGWIGHDEAEFAVAIRSGLVDGARLSLFSGAGIVPESNPLSEWDEIESKISNFLIIMNRH

SEQ ID NO: 93440 - protein, 400 aa, Unknown
  misc_feature (1)..(400): tr|A0A2H6H8J2|A0A2H6H8J2_9BACT Salicylate biosynthesis isochorismate synthase OS=bacterium BMS3Bbin01 OX=20057 24 GN=pchA PE=4 SV=1
MLFPNDVATGLTAGLSVPCAVQPIDLARSASRAGFPVFYFGRREEAVGVGVAWRSDDLLARPPSEGRLFFAFPFDGSRRAGSVVLPAVTLVKGEAGGRLHVAPGQEEMPAMLSRLEHPGETPAPAGRVTARDPESDVWAAMVERARETIGSGLLSKVVLARSVTLAFDEVRPFDVVALLRERFPDAFTYGWAENGSAFVGASPELLVERRGESIRSFPLAGSAVRGSGSIDDAKSARALLGSAKDRSEHQFVVDEIVRLLRPLTSEMSVPTRPTVVRVANIQHLGTEIRGLLARPMGVVQLAMALHPTPAVCGTPTAAALSFIRDVETLDRGWYAGGVGWTDASGDGEAAVALRCALLQNHGARVYAGAGIVRDSDAAAEVAETEAKLRALLDILQTDPL

SEQ ID NO: 93441 - protein, 440 aa, Unknown
  misc_feature (1)..(440): tr|A0A2H6HDY7|A0A2H6HDY7_9BACT Salicylate biosynthesis isochorismate synthase OS=bacterium BMS3Bbin02 OX=20057 25 GN=pchA PE=4 SV=1
MLISSDDIRSLATALGGVSATVRTVVVPTSVHPLQFVRSAAHLFGRAFFFSEPTGRAFGGLGAAWRATASGPDRFSLLEEELSTAGLPPDVEAAMGFSFSEDGPKSDLWDGFGAAEACVPEIAISVSNSGKPQLRVTIAAGQSSDRVLSVLARLVEPDRLRPPEPGDYTIEAHPSTLEWQREVDDAVEAIRAGVVHKVVLSRSVVVKSEASVPPFDLVHHLGAVHRGCYIFGWQTGDAVFLGATPELLLSKRGRRIVSNPLAGSARRGPDDEADRGIGAELMASSKDRSEHAFVVDDIRDRLGPLTGDLVVPSEPSVLRTAAVQHLSTRISGTLLDGVSLYEAAATIYPTAAVGGSPRQQAQVLIDKVEQLDRGWYTGGIGWVDSDGDGTIALGLRCGLVRGSEAHVFAGNGIVAESDAETELLETRLKLRPMLNLLSAT

SEQ ID NO: 93442 - protein, 439 aa, Unknown
  misc_feature (1)..(439): tr|A0A3A9BCQ5|A0A3A9BCQ5_9BACT Isochorismate synthase O S=bacterium D16-34 OX=2320120 GN=D7W09_02045 PE=4 SV=1
MSKIYSFTTPIEADIVDAFCTLQKGFTDQFVYYRKDKPVRYMGLGRCVALSSVDDIDCVYAGDKEEPPVYFSFNRFDATNPAAPDELFESFPQLHFLLPEIVLIENARGSFLQVNSLGPVYPGRVERFYRQALAASPRTRRTIRYTREPDSREAWEQAMAQALDAIEHDRVKKVVLSRRQKVVAASPFSSKDLLVNLIDGSAQGTVLMYRYADVFFCACTPELLVRKTGQRIESMCLAGSAPVGETAKEREAYGAQLLADEKNLEEHDYVVAFIRDVLMRNCYDVQVPSEPTLLKLPTIQHLYTPCSAELLEGTSLWDIAAQLHPTPAVAGTPVGEARMLLRQIEPYNRGFYAGACGYVDGKGDGEFSVALRSGVFDGEIGWIYAGCGIVAQSNVASEYDEVALKLQTILSAFDGEAKAVCADDSKECSCEAERGAHES

SEQ ID NO: 93443 - protein, 420 aa, Unknown
  misc_feature (1)..(420): tr|A0A2H5WB61|A0A2H5WB61_9BACT Isochorismate synthase D hbC OS=bacterium HR12 OX=2035407 GN=dhbC PE=4 SV=1
MAHLVARARRLGPAYDLLAAYRADGVFFERGGLGLAGAGVAERIGVGGGPDRLPTLAREVETVLRHIRRDPAAPAPVAVGAIPFDDGRPAELLVPERLVQRRRPGETVALEVFAEGLAPADHERERWVGRALPHAAFEEIQLRADPEPEAYAAAVREAVRRIRAGGLRKVVLARTVVVAADRELDPKQLLWRLRAVDPDCFTFAAPELVPGTAAPVGVLVGATPELLVAKRGDRVLATPLAGSSPRFGDPGEDAASAAHLLASAKDREEHALVVEGVEAALAPLCEELHHPHEPEPLGTANVWHLATPFRGRLRPGVRSVLDLVAVLHPTPAVGGSPREAATAALAELEPIDRGWYAGPVGWVDADGDGEWAIALRCAELTGRTARVFAGAGIVADSDPASELEETERKFRALLDALRWG

SEQ ID NO: 93444 - protein, 453 aa, Unknown
  misc_feature (1)..(453): tr|A0A2H5XN56|A0A2H5XN56_9BACT Isochorismate synthase M enF OS=bacterium HR18 OX=2035413 GN=menF PE=3 SV=1
MTRAEHPVCMPDQLPRALEDRMHRLLRRSAEDRIVRLLFQLPSIDPLHWLAAQTLPVQFYWADRDRTLTVAAVGTLEQYEGMGIEPVRALEKRLHQADVGVRFFGGGCFDVQAARAAYWLPFGPWRFWLPRFELWRQGSRCWLACNLIPARDRDAEALSGSLSWPETLPAAPLPLPLDRIDLPDYRGWAHNVQQALKAFQQGKLEKVVLARQVCFTFGEPLDSLTLMQRLEEATPGCFHFYYQPEVGKAFLGASPERLFRRAEGQVWTEAVAGTRPRGQTEADDARLAAELLESEKDRREQYYVQQSILEELRPWCQTLEVDTQLSEMTLARGRHLYTGIRGRLHAQVPTATLLEVLHPTPAVGGYPRQEALAAIRDWEPFDRGWYAGPIGWIGAETAEFAVAIRSGLVDGTRLYLYSGAGIVEGSVPELEWAEIEHKISDFVNVLGLELRRS

SEQ ID NO: 93445 - protein, 458 aa, Unknown
  misc_feature (1)..(458): tr|A0A2H5YWI3|A0A2H5YWI3_9BACT Salicylate biosynthesis isochorismate synthase OS=bacterium HR27 OX=2035422 GN= pchA PE=4 SV=1
MSRHALRPALADLWTVAERRAAAAGQPVLLSWSDTSEPADPIALFTRSSETIRLLWYAPATGEAVVGLGGRRLPIATGAAAAGTVPERLARVWRTAAAEALQEGPLAPLVFAGWAFDPHQPGDAPDWASFGAAQLLLPRFVYRQRGALAFQALQAIVRPGETMPPSPPASRPVGRPDSQTGQPRIVTRRDLLNRGDWQRLVETALTAIDQGTLRKVVLARAVDLVADRPFDEERALRSLAERYPNCTLFAVAMGSSVFLGATPERLARVTAGTVTTVALAGSIPRGADAASDRSTVAVLRASAKDRSEHELVVQAIEQALAPLCTRLSVPDAPVVLSMANVHHLATPIVGVLRDGLGVLDVAARLHPTPAVGGTPRETALAFIRAHEPVPRGWYAGAFGWVEATGDGELVVALRSGLLRGSTARLYAGCGIVAGSDPLTEWTEAEAKLRPMLEALAGS

SEQ ID NO: 93446 - protein, 459 aa, Unknown
  misc_feature (1)..(459): tr|A0A2H5Z7B2|A0A2H5Z7B2_9BACT Salicylate biosynthesis isochorismate synthase OS=bacterium HR28 OX=2035423 GN= pchA PE=4 SV=1
MMRRDVLASTFADLWAIAERRARALRRPVLLSWSKLIEPLDPIALFAADTSSTPRILWLIPQTGEAIVGLRCQRLPVQEVNPSPSSALARLAHSWRWHAAEAVQEGPLAPLAFAGCAFEPEDPRIDTWWEPFGNLQAFLPRLAYVQRGELSAQLVQHTVRPDDLVPLTTPDWPPSTQTSPRTRPSVVRRHDRVSRAHWAELVEAARNAIRRGELCKVVLARAVELTAERPFSFEITLRALAERYPTCTIFAVGIGETVFLGATPERLVQVENGTVTTVALAGSAPRSADPIRDRAAAAQLLTSQKDRHEHALVVEAIRTALLPLCRRLAVPDEPQLVSIANVHHLATPIAGVLADGQGALDVAARLHPTPAVGGTPREAALAFIRAYEPIPRGWYAGALGWITASGDGEFVVGLRSGIVRDTVARLYAGCGIVADSDPVAEWDESEAKLRPMLEVLGGT

SEQ ID NO: 93447 - protein, 453 aa, Unknown
  misc_feature (1)..(453): tr|A0A2H5ZEE1|A0A2H5ZEE1_9BACT Salicylate biosynthesis isochorismate synthase OS=bacterium HR29 OX=2035424 GN= pchA PE=4 SV=1
MTFVRPVAEPAPRLLAEARTRAAALASAAEGKAFAVAALPIRRPADTLEAFREVREGVRLAFLQPERGFSIVGIGIAAAWPLNGPDPLSEAAGLLRSMPPAAVAGDAPPRELPIVFAGVAFCPGDRAPHWGPFGNGLLVVPRVLLLVEPAGAWRVETELVGTEGRAIPARLPQPPAAGPFTDRAATQAEWTAAVLRALDRIARGEATKVVVAREAYLPEHRSADEALAVLVDRFPTCTVFAVDLGGPCFLGATPERLASVSQGTFELMALAGTAPRGADSAEDDAIAARLAADRKEREEHAVVVRALREDVAPLVSELEVAPEPEVVRLPNLQHLRTLLRGRLRDGCSLFDLAARLHPTPAVGGMPREAAARIIAEVETFDRGWYAGPLGWADARGDGELVVALRSALLTPGQPARLFAGCGIVARSDPEREFSESELKLRAIRSALVREEGS

SEQ ID NO: 93448 - protein, 320 aa, Unknown
  misc_feature (1)..(320): tr|A0A2H5ZRD5|A0A2H5ZRD5_9BACT Salicylate biosynthesis isochorismate synthase OS=bacterium HR31 OX=2035426 GN= pchA PE=4 SV=1
MLRVSVRGAEYVALSCLVTPEGGQEQVDRTIQALESVREVPAGTSGRGEVVRAVPGEQDWKTQVLDAEAACRVGELEKVVLARCVEVATSVTPDGVLQVLSERYPTCTVFAVAREGAVFLGATPETLVRVKRGRVWTQALAGTAPRGTDPDEDAVLQRQLASSSKEAREHELVVAHLREALSSVCSRVVQGPREVVTLPNVHHLRTRFSGRLVADSTVLEVAGRLHPTPAVAGLPVGRAREWIRTREPVPRGWYTGVVGWVDASGDGELAVAIRCGLLRGGRAWLFSGCGVVAGADPEREYRESQLKLRPVMEAFGVREP

SEQ ID NO: 93449 - protein, 448 aa, Unknown
  misc_feature (1)..(448): tr|A0A2H5ZVX1|A0A2H5ZVX1_9BACT Salicylate biosynthesis isochorismate synthase OS=bacterium HR32 OX=2035427 GN= pchA PE=4 SV=1
MPTLGLLDAQLVHRFRSLACAAAARATGEPVLVWASAGAEIAPYSLPRAPGWLWRSPRTRTQATASGEAWASQGSVEATERAWRALLARSVSAGPVGPLAFCGVAFDATAAPAGVWAGFPASIVSVPRVLWLRVRGRPYVALACVAGATDLLEEVERTLAWAERWPADEADATPVGARVVAERPSADAWKSCVAHAEACCRAGPLQKVVLARSVELEGGSGPAEVVRRLQARYPTCTVFANARAGATFLGATPERLAFVRGGRVVTEALAGTAPRGRTSEEDDLLRRQLEASPKQRWEHELVADHVRAVLERRCVRTWEGRREVLALRNVQHLRTRFAGRLSPPADAVTAALALHPTPAVAGSPVDLAQRWLREHEPLDRGWYAGVVGWVSAQAAELVVAIRSALITPGRAWAFAGCGIVAGSDPEAEYAESQVKLLPLLEAMGAEGL

SEQ ID NO: 93450 - protein, 478 aa, Unknown
  misc_feature (1)..(478): tr|A0A2H6B5V6|A0A2H6B5V6_9BACT Salicylate biosynthesis isochorismate synthase OS=bacterium HR41 OX=2035436 GN= pchA PE=4 SV=1
MAGSDRSGVRSEAHHGPFARDLVTLLDSDAARRARTRGGLVCAVRELPAAPDPALAVARLRQPGERWFAFEVPDRAGFAVAGTGVVRRVRSVGPGRFAAAAGRWREAVADAAVAHGDGGDALPLAVPVAVGGFAFADSGPTTPQWDGFGALDFVFPEVAIVREGGRSWLVLQVASDAAVVRARADAVARLLDARLSAPLLDPDPLSRPRITSVLAPEHFEEAVRRATALLRAGEAEKVVLARAVRVDTRSAIDPLALYCALREVFPACYTYLVGAADASFVGATPELLVRRDGLRVQTVALAGTARRSADPAVDRHLGEQLARDPKQRREHEIVARRLARNLEPLAVWVTVAAEPQLVRVHNVQHLATPIRAQLREPVTLFELAERLHPTPAIGGEPRAAAARLVPALEGIDRGWYAGGIGWIDRDGGGELAVALRCALVRGTSAELYAGCGIVAESDPAAELAETEAKLAAVLPLFG

SEQ ID NO: 93451 - protein, 397 aa, Unknown
  misc_feature (1)..(397): tr|A0A4S1I7P0|A0A4S1I7P0_9BACT Isochorismate synthase O S=bacterium M00.F.Ca.ET.141.01.1.1 OX=2563898 GN=EN784_ 08785 PE=4 SV=1
MNDSLIQGTWPEAAPAPQEGTDDASLFLLQHAGQHVHARGCRATLPAGALATLAERVSAFFAQQRGGPGLLVGAVPFEPRADDALYQPERLLPALPLPPQAAPALEGALQAEPTPEAYAASVAAAVQVLRAPGLDLQKVVLARSLLARTRQSLSPEVLLARLGADPSVATYAVPLPVAPGQAPAWLVGATPELLLRKRGAELLSHPLAGSARRSIDAAEDERAAQALLASTKDHDEHRHVVEAIVDGLAPYCSHIDAQPRPALHATASMWHLGTRIHATLKDPQTSAAALLAQLHPTPAVCGTPRLAALQRIGELEPVPRGFYGGAVGWLDAQGDGDWYVAIRCARLQGTQLRLFAGAGIVAESQPEAEVAETAAKFAALLNALGVHASAPTNEPAA

SEQ ID NO: 93452 - protein, 397 aa, Unknown; identical to SEQ ID NO: 93451
  misc_feature (1)..(397): tr|A0A4S0Z6U2|A0A4S0Z6U2_9BACT Isochorismate synthase O S=bacterium M00.F.Ca.ET.163.01.1.1 OX=2563906 GN=EN806_ 03235 PE=4 SV=1

SEQ ID NO: 93453 - protein, 391 aa, Unknown
  misc_feature (1)..(391): tr|A0A4S1HJN6|A0A4S1HJN6_9BACT Isochorismate synthase O S=bacterium M00.F.Ca.ET.168.01.1.1 OX=2563907 GN=EN811_ 02575 PE=4 SV=1
MKTGALRTNDVESDEIADFNRDFLFTSGTGQLRAKGIRERITLPARGGEDTGSPLQQAIKAAFERARRAGQDNPIAIGAIPFDVSEPSCLYIPNNHEWSPRETAPVVADSAMPALVGQNSLPDETGFKRAVEHAIVNFRHSDVRKAVLSVMRELTFASEVNVERLLASLAKQNREGYQFRIPLPDGGDLIGVSPELLIRKQGENIISNPLAGSAKRMVDPAADKANAERLSASEKDHYEHSLVIEDIRSLLSPVCAELDVPEKPSLINTAALWHLSTRIEGRLADPETNALQLACLLHPTPAVCGFPTERAHRLIRFVEPFERGLFTGMVGWTDFEGNGEWVVTIRCGTVQRKTVRLFAGAGIVEASEPESEWAEVQTKLKTMLNACGLSA

SEQ ID NO: 93454 - protein, 397 aa, Unknown; identical to SEQ ID NO: 93451
  misc_feature (1)..(397): tr|A0A4S0RE23|A0A4S0RE23_9BACT Isochorismate synthase O S=bacterium M00.F.Ca.ET.177.01.1.1 OX=2563908 GN=EN820_ 03235 PE=4 SV=1

SEQ ID NO: 93455 - protein, 391 aa, Unknown; identical to SEQ ID NO: 93453
  misc_feature (1)..(391): tr|A0A4S0N2E5|A0A4S0N2E5_9BACT Isochorismate synthase O S=bacterium M00.F.Ca.ET.179.01.1.1 OX=2563909 GN=EN822_ 02575 PE=4 SV=1

SEQ ID NO: 93456 - protein, 450 aa, Unknown
  misc_feature (1)..(450): tr|A0A4S0LR44|A0A4S0LR44_9BACT Isochorismate synthase O S=bacterium M00.F.Ca.ET.180.01.1.1 OX=2563910 GN=EN823_ 06905 PE=4 SV=1
MTLDVKESEIVEAVYESNQTWVSVEAKLDYELEPTLLFHLTEDCAGDRFYFKKNDNETSFFGYHAITRFKNDFENKQSIFREWEKYKNDIELIHPNSEKHHLKICGGFQFSTHKSGDEWREFGINHFVLPEVLVTMEAGQSFITYTVEADKFEMDAFLAIIDKLTQMDVQPNDEIGEIKRIDDIYKDEWRDLVKDTIDILDENKKIVLARKRLIMFDKNINIPYILNRAMQGEHNSYLFVLESKDSVFFSQTPEQLMEVKDDVLSTKAVAGTIKRTHRDDIDKANIDAFLNDKKNLNEHHFVVKSILNDIKPYVEQIAFNKKPQILTNDHLYHLYTKIEGRLIQNSYIGLLDNLHPTPALGGYPKEEAISYIENNEFGTRGLYGAPVGYIDMYDNCEFIVAIRSMLIKKNQATLFAGCGIVQNSDADSEVEETAVKFNPMMKALGVEKYE

SEQ ID NO: 93457 - protein, 391 aa, Unknown; identical to SEQ ID NO: 93453
  misc_feature (1)..(391): tr|A0A4S0GT29|A0A4S0GT29_9BACT Isochorismate synthase O S=bacterium M00.F.Ca.ET.194.01.1.1 OX=2563912 GN=EN837_ 02575 PE=4 SV=1

SEQ ID NO: 93458 - protein, 397 aa, Unknown; identical to SEQ ID NO: 93451
  misc_feature (1)..(397): tr|A0A4S0FN66|A0A4S0FN66_9BACT Isochorismate synthase O S=bacterium M00.F.Ca.ET.199.01.1.1 OX=2563913 GN=EN842_ 08050 PE=4 SV=1

SEQ ID NO: 93459 - protein, 450 aa, Unknown; identical to SEQ ID NO: 93456
  misc_feature (1)..(450): tr|A0A4R9SGD1|A0A4R9SGD1_9BACT Isochorismate synthase O S=bacterium M00.F.Ca.ET.229.01.1.1 OX=2563919 GN=EN872_ 06910 PE=4 SV=1

SEQ ID NO: 93460 - protein, 437 aa, Unknown
  misc_feature (1)..(437): tr|A0A3N9MX36|A0A3N9MX36_9BACT Isochorismate synthase O S=bacterium OX=1869227 GN=EH220_06145 PE=4 SV=1
MFSSPANPLTNLTLKANPILRARVGNLKVSDPWLLLDTAPHVIYWQSRNSDELWCGVGESYGDPLLSTALRVQESIEGVEDLPFKPRCFGMTRFHPYGPAASDWEGFPQRGYWIPRLQIRYRGTERDVIIIEDKHHISDPEIDMLPVFDPMFEKTSPNSLVEERSNLSRDDWRTAVRTIQSRIESGILEKTVLARQLELTAEKRISAAAVMQRLAQSSPESYLFAYRHPRSGIFFGASPERLFHLKDQTVSVDSLAGTRPRNTGAQTDQELAHELVLSDKDKKEQRFVTDYVLDKLTPLCSELKVSDLQVKNLATVQHLYNSITGNLLSPTDHYTAAETILERLHPTPAICGVPTDAARQLIEELEPNPRGLYAGAIGMADNRSAEFAVAIRSGLLRDNRAILFAGAGIVAESVADEEFTECDWKFAALRQALFSEA

SEQ ID NO: 93461 - protein, 382 aa, Bacteroidaceae bacterium
  misc_feature (1)..(382): tr|A0A5C6HRC1|A0A5C6HRC1_9BACT Isochorismate synthase O S=Bacteroidaceae bacterium HV4-6-C5C OX=2600309 GN=FQ70 7_00160 PE=4 SV=1
MTESKKDLSIINNLISRKQPFAFYRLPEQEKLCFLTQTTGEAEAIFNVESIHNKPGFILAPFRIKKGSPAWRIRPDYIDTNFPLETGKKSNSTTSTAPNGTEERKIDDNSRTGGNEISPSANVGDFEQYASCFRSFIEPLRKGIYDKLVLSRRVVYPGYSGFSPEHALYEACRRYVHSYVYLCYTPQTGVWLGSTPEMLLSGEADRWNTVALAGTMSLENGQLPEEWSNKNKEEQQYVADYIRKQLRSVGITPEEHGPYPSYAGALSHLKTDFHFHADTARLGELLKVLHPTPAVCGLPKEKAYRFIKENEGYDRNYYSGFVGMLNPLGKTDLYVNLRCLNYKVNELSLYAGSGLLSASELEDEWQETEKKLQTMKRLLFSE

SEQ ID NO: 93462 - protein, 272 aa, Bacteroidales bacterium
  misc_feature (1)..(272): tr|A0A180FRE3|A0A180FRE3_9BACT Isochorismate synthase e ntC OS=Bacteroidales bacterium Barb7 OX=1633203 GN=entC PE=4 SV=1
MTTGYPKRFRRFITPLREGCMKKLVLTRRVEVERTADFSPATAFLMACQKYPEAYVYLFHTPDTGTWLGCTPEIFLSGGNGNWLAAAIAGTQPLVADGLLPQVWSEKNYAEQQLVADFIQSQLTTAGLKPSVTGPYAIHAASDIAHLKTDFRFSVPDDNHTGDLLKLLYPSPSICGLPKEEAFRFINEREGYDRRYYSGFLGRLDPKGKSELYINIRCMEILPDFLELYVGSGLLPNSAASEEWRETEAKLRTMRSLIYKSYVPGEDKTSEQ

SEQ ID NO: 93463 - protein, 365 aa, Bacteroides acidifaciens
  misc_feature (1)..(365): tr|A0A4V6RCS4|A0A4V6RCS4_9BACE Isochorismate synthase O S=Bacteroides acidifaciens OX=85831 GN=E5356_06290 PE=4 SV=1
MIDEEISNLTAIDTFIRQKQPFAVYRIPGEKVPRLLQTGGTVRLIYDLKDLNGQRGFVIAPFRVSGTCPIVLIQPDQSGQPLPMDVDTDGEQEKTGQTQMRETYLNTCTDKYAACFHTFINALRDETFDKLVLSRELVIGQMPDFSPSSVFRAACKRYIHSYIYLCYTPQTGIWLGSTPEIILSGEKDGWNTVALAGTQPLQDGKLPQAWDEKNRKEQDYVASYIRRQLLSLGIRSTENGPYPAYAGALSHLKTDFHFSLKDNKDLGNLLKVLHPTPAVCGLPKEEAYQFILENEGYDRRYYSGFIGWLDPDGRTDLYVNLRCMHIEDEQLTLYAGGGLLASSELDDEWLETEKKLQTMKRLIAY

SEQ ID NO: 93464 - protein, 364 aa, Bacteroides caccae
  misc_feature (1)..(364): tr|A0A174PLW2|A0A174PLW2_9BACE Isochorismate synthases OS=Bacteroides caccae OX=47678 GN=entC PE=4 SV=1
MTTIDAFIERKQPFAVYRIPGEKIPCLVTQEEGAVRLIYDLQELNGQRGFVIAPFRPNETCPILLIQSNGPGQPLLLADDADAVPRDIPSTDYPSCSEEYAECFRTFISALRDKTFEKLVLSRKLTIGKPTAFSPSLAFRAACQRYIHSYIYLCYTPQTGIWLGSTPEIILSGEKDDWHTVALAGTQPLQDGKLPQVWDEKNRKEQEYVSSYIRGQLLSLGIHSTENGPYPAYAGALSHLKTDFRFSLQDNKGLGDLLKVLHPTPAVCGLPKDTAYRFILENEGYDRRYYSGFIGWLDPDGRTDLYVNLRCMHIEEEQLTLYAGGGLLASSELNDEWLETEKKLQTMRRIIVPASLHDPQPITS

SEQ ID NO: 93465 - protein, 371 aa, Bacteroides caecimuri
  misc_feature (1)..(371): tr|A0A4S2CGF3|A0A4S2CGF3_9BACE Isochorismate synthase O S=Bacteroides caecimuri OX=2516958 GN=E5353_16695 PE=4 SV=1
MIDEEISNLTTIDAFIQRKQPFAVYRIPGEKVPRLLTQAEGAVRLIYDLKELNGQRGFVIAPFQVSESCPVVLIQPDQWGQPLSVDDDTEEDREIALRLQGQESFLTSSTEEYAACFHTFINALRDRTFDKLVLSRHLTVDKVADFSPLSIFRAACKRYIHSYIYLCYTPQTGIWLGSTPEIILSGEEDEWHTVALAGTQPLQDGRLPQVWDEKNRKEQDYVASYIRRQLLSLDIHATENGPYPAYAGALSHLKTDFRFSLKDNKGLGDLLKVLHPTPAVCGLPKEEAYQFILQNEGYDRRYYSGFIGWLDPEGRTDIYVNLRCMHIEDKQLTLYAGGGLLASSELNDEWLETEKKLQTIKRLIAVPPLKS

SEQ ID NO: 93466 - protein, 439 aa, Bacteroides caecimuris; identical to SEQ ID NO: 93442
  misc_feature (1)..(439): tr|A0A3A9BGD9|A0A3A9BGD9_9BACE Isochorismate synthase O S=Bacteroides caecimuris OX=1796613 GN=D7W50_07215 PE=4 SV=1

SEQ ID NO: 93467 - protein, 373 aa, Bacteroides coprocola
  misc_feature (1)..(373): tr|A0A412GKE9|A0A412GKE9_9BACE Isochorismate synthase O S=Bacteroides coprocola OX=310298 GN=DWY20_09340 PE=4 S V=1
MNLPGTTIHKLIDNLTRSPFSFALYRLPWTDEPILVLQEEEDVEVLNSPAALNGKRGFVMTPFHQTEEYPAVLIRPDKVAHEWENISQSLEAFASSISFEFSSSFNSKEKRSTNAQEAKEKYEQVFSRFISSLEDNTFKKLVLSRNYTQALEGDFSPLTAFIRACNNYPRMMISLCHTPQTGTWIGSTPEIILSGQDTEWHTVALAGTMPMQGEIMPTEWSEKNQNEQAFVSEYIRQTVKRFGNKLKEKGPYTARAGQLVHLKTDFHFELKDTAHLGDIVQELHPTPAVCGLPKEEAYHFILNNEGYNRAYYTGIIGWLDPQGETTLYVNLRCMNITDKTATFYAGGGILPSSTVETEWEETQQKMNTMRNIL

SEQ ID NO: 93468 - protein, 360 aa, Bacteroides coprophilus
  misc_feature (1)..(360): tr|A0A413SZ28|A0A413SZ28_9BACE Isochorismate synthase O S=Bacteroides coprophilus OX=387090 GN=DW921_09290 PE=4 SV=1
MNKPATALYRLPYTDSPILIAQLQGEPQILTSLQELNGRKGFVIAPFRLTSSTPAVLIRPDLIAKGWDQIHEVLQCHPELKPGIISCGNESVESSEPILKKAYEEAFGRFITPLRQGQFRKLVLSRSATYPLPQDFSVMDAFIRACKEYPRMMISLHSTPFTGTWMGSTPEIILSGNGRQWHTVALAGTVPLIEGEENVTWSEKNRKEQALVTEYIREVISRFGTQSEEQGPYTARAGRLLHLKTDFKFQIDNPENIGNLLEALYPTPAVCGLPKQEAYDFIIANEGYDRSYYAGVIGWTDPDGDTNLFVNLRCMQLTPHSAVLYAGGGLLPSSDPELEWNETLHKMATIKNTLTPNSRK

SEQ ID NO: 93469 - protein, 380 aa, Bacteroides dorei
  misc_feature (1)..(380): tr|A0A5C6L5U8|A0A5C6L5U8_9BACE Isochorismate synthase O S=Bacteroides dorei OX=357276 GN=FSA04_09775 PE=4 SV=1
MNLPDIHTQKLLDCLTHSRLGFALYRLPWTDECYLVLQTSGDVEQLADIQELNGKKGFVMAPFRISEEHPLVLIRPDVTAYDWSEISEALSSLECADALLTCKSRQSELSPFVSEETDKEQYTRAFGRFITPLQEKLFQKLVLSRSSARHIGDDFSPLGAFVRACNNYPRMMIYLCHTPASGTWLGSTPEILLSGHGKEWHTVALAGTMPMQNEVMPTDWDKKNREEQGYVADYIRRIAKRFGNKMTEKGPYTARAGQLVHLKTDFYFLLKNTDHIGDLLQELHPTPAVCGLPKEEAFRFIPDNEGYDRSYYSGFTGWLDTEGHTDIYVNLRCMEIKPGEAILYAGGGILASSEVESEWMETGDKMNTMRSILHPDFINK

SEQ ID NO: 93470 - protein, 376 aa, Bacteroides eggerthii
  misc_feature (1)..(376): tr|A0A414MG90|A0A414MG90_9BACE Isochorismate synthase O S=Bacteroides eggerthii OX=28111 GN=DW701_04620 PE=4 SV =1
MIDKEISNLTAIDTLIRQEQPFAVYRIPGEAAPHLLMQATGNVRLLHDLEELDGERGFVIAPFRVSEESPIVLIQPEEPEHFLLPDEYSEEEQEAFRLFQEQETFSETYTEGYETCFRTFIEALRSKRFDKLVLSRKSVIGQFPDFSPSAVFHAACKHYIHSYVYLCYTPRTGVWMGSTPEIILSGEKDEWSTVALAGTLPLQNGNLPQEWGEKNRQEQEYVVSYIRRQLLSLDIHPAESGPYPAYAGALSHLKTSFHFTLRDNRKLGSLLKVLHPTPAVCGLPKEEAYRFILENEGYDRRYYSGFIGWLDPSGKTDLYVNLRCMHIENGQLSFYAGGGLLASSELNDEWLETEKKLQTMKRLLRIPSHDSLTTNH

SEQ ID NO: 93471 - protein, 367 aa, Bacteroides faecichinchillae
  misc_feature (1)..(367): tr|A0A1M5A626|A0A1M5A626_9BACE Isochorismate synthase O S=Bacteroides faecichinchillae OX=871325 GN=E5981_04855 PE=4 SV=1
MTDEEIRNLTTIDAFIQRKQPFAIYRIPGEEYPRFLTQTTGEVCLIYDVKDLDRQRGFVIAPFHVSEACPIVLIQSEQPGQPLPIEEGIIPDDFSVFSSEEESFIASCSEEYAACFHTFIEALSNHTFDKLVLSRSLTIQKVSEFSPLAAFRIACRRYVHSYIYLCYTPQTGIWLGSTPEILLSGEKKEWNTVALAGTQPLQGGKLPQIWDDKNRKEQEYVTSYIRHQLLSLGIRATENGPYPAYAGALSHLKTDFQFSLKNSETLGELLNVLHPTPAVCGLPKEEAYRFILDNEGYDRSYYSGFIGWLDPDGRTDLYVNLRCMQVGKETLTFYAGGGLLASSELNDEWQETEKKLQTMRRLTPALS

SEQ ID NO: 93472 - protein, 370 aa, Bacteroides faecis
  misc_feature (1)..(370): tr|A0A3E5G6A5|A0A3E5G6A5_9BACE Isochorismate synthase O S=Bacteroides faecis OX=674529 GN=DXB21_18530 PE=4 SV=1
MTDEKKNLTTIDALIQRKQPFAVYRVPGERFPRLLTEDTGAVRLIYDLKELNGQRGFVIAPFCVEKSCPIVLIQSDKTGQPLPVETDTDEEEELNLQTYPKESFLTLCSEKYATCFHTFIEALRDATFDKLVLSRSLTIGKHPEFSPSAVFRAACQRYIHSYIYLCYTPQTGIWLGSTPEIILSGEKNEWNTVALAGTQPLLDGKLPQEWDDKNRQEQDYVASYIRRQLLSLGIHSTEKGPYPAYAGALSHLKTDFHFSLKDNRNLGDLLKVLHPTPAVCGLPKEEAYRFILENEGYDRKYYSGFIGWLDPEGWTDLYVNLRCMHIEDEQLTLYAGGGLLSSSELNDEWQETEKKLQTMRRILVSAPHND

SEQ ID NO: 93473 - protein, 373 aa, Bacteroides finegoldii
  misc_feature (1)..(373): tr|C9L257|C9L257_9BACE Isochorismate synthase OS=Bacter oides finegoldii DSM 17565 OX=483215 GN=BACFIN_08687 PE =4 SV=1
MIDEEISNLTVIDALIRQKRPFVVYRIPGEKLPRLLTQAEEEIRLIYDLQELNGQKGFVIAPFRVSEMCPVVLIQSDGWGQSLSLDDDTEEEYEASLQIQEQENFQTSYTKEYADCFQAFINALRDGTFDKLVLSRRITMDKGADFSLSSVFRAACKRYIHSYIYLCYTPQTGIWLGSTPEIILSGEKDEWNTVALAGTQPLQDGKLPQVWDEKNRKEQDYVTAYIRSRLLSLGIHSTESGPYPAYAGALSHLKTDFHFSLRDNNGLGDLLKVLHPTPAVCGLPKEEAYRFILENEGYDRRYYSGFIGWLDPNGRTDLYVNLRCMHIEDERLTLYAGGGLLASSELNDEWLETEKKLQTMKRLITSTSIIANY

SEQ ID NO: 93474 - protein, 369 aa, Bacteroides fragilis
  misc_feature (1)..(369): tr|A0A4P8LD30|A0A4P8LD30_BACFG Isochorismate synthase O S=Bacteroides fragilis OX=817 GN=IB64_010665 PE=4 SV=1
MTSEETNNCEIIDELIRQGRSFAMYRNPGEEEPHFLMQTYGEVRLVREMEELNGQTGFVIAPFRVTPQCPIILIQPDCQEIPSCAGSPRRSVQPVCTEVCSLSAQNERPVRAKEAYAACFDIFIRALRAHTFDKLVLSRKVTVKKEPGFSPASAFYKACRRYIYSYVYLCYTPQTGVWMGSTPEIILSGEKGEWNTVALAGTQSLQNGELPQHWDEKNREEQEYVAAYIRNQLRSLGISPVEKGPYPAFAGALSHLKTDFRFSLNDSRKLGDLLKLLHPTPAVCGLPKEEAYRFILDNEGYDRSYYSGFIGWLKPEGKTDLYVNLRCMNVKEDTLTLYAGGGLLASSELDDEFQETEKKMQTMKNLNSL

SEQ ID NO: 93475 - protein, 366 aa, Bacteroides heparinolyticus
  misc_feature (1)..(366): tr|A0A3P2ACM5|A0A3P2ACM5_9BACE Isochorismate synthase O S=Bacteroides heparinolyticus OX=28113 GN=EII33_06150 P E=4 SV=1
MTDKDTSKLKTIDALIEREEPFAVFRLPEEKVPRLLTLEGGTVRLIYDLKDLNGEKGFVIAPFRVSETCPVVLIQPGRQEPLPDEKTREGKERALQMQERFQSSPTEEYTTCFQSFIHALCNRTFDKLVLSRRFTIDRTPEFSPSSAFQAACRQYIHSYIYLCYTPQTGMWLGSTPEIILSGKSDQWSTVALAGTQPLRNGKLPQTWDEKNKKEQEYVTSYIRQQLRSLDIRSTENGPYPAYAGALSHLKTDFGFSLKDNKELGNLLKVLHPTPAVCGLPKEEAYRFILENEGYDRRYYSGFIGWLDPDGKTDLYVNLRCMHIEDKQLTLYAGGGLLASSELNDEWLETEKKMQTMKRLTAMPLNS

SEQ ID NO: 93476 - protein, 373 aa, Bacteroides nordii
  misc_feature (1)..(373): tr|A0A413VBF1|A0A413VBF1_9BACE Isochorismate synthase O S=Bacteroides nordii OX=291645 GN=DW888_18510 PE=4 SV=1
MINTGEQEAYILVDRFIETGMPFAMYRIPGEKVIHLMVQLNSEVSLFNDIEELNGRSGFVIAPFRIGKDTPIVLLRPDEVCEIEFDSTKECSDDIKPDYYSPVAERAPKSVHYAPCTDKYAGCFGIFIKALRQKQFDKLVLSRDQKLDVPSKFSPAAAFHEACRRYLYSYVYLCYTPQTGVWLGSTPEIILAGEKNEWSTVALAGTQSLQNGKLPQEWDDKNREEQEYVASYIRSQLLSFNIHPEENGPYPAFAGALSHLKTDFHFSLPDSNKLGNLLNLLHPTPAVCGLPKEEAYRFIQDNEKYDRRYYSGFIGTLNPSGKTDLYVNLRCMNISSEQLTLYAGGGLLASSELEDEWLETEKKMQTMLNLIDS

SEQ ID NO: 93477 - protein, 371 aa, Bacteroides ovatus
  misc_feature (1)..(371): tr|A0A3D2LQ42|A0A3D2LQ42_BACOV Isochorismate synthase O S=Bacteroides ovatus OX=28116 GN=DHW41_02065 PE=4 SV=1
MTDEEISNLTTIDAFIQRKQPFAVYRIPGEKVPRLLTQAEGAVCLIYDLKELNGQRGFVIAPFQVSETCPVVLIQPDQWGQPLPIDNDTAEEREVALRMQGQESFLTSSTEEYASCFHTFINALRDNTFDKLVLSRHLTIDKVSGFSPLSIFRAACRRYIHSYIYLCYTPQTGIWLGSTPEIILSGEKDEWNTVALAGTQPLQDGKLPQIWDEKNRKEQAYVASYIRRQLLSLGIHSTENGPYPAYAGALSHLKTDFQFSLKDNKGLGDLLKVLHPTPAVCGLPKEEAYRFILQNEGYDRRYYSGFIGWLDPEGRTDIYVNLRCMHIEDEQLTLYAGGGLLASSELNDEWLETEKKLQTIKRLIATPPLKS

SEQ ID NO: 93478 - protein, 377 aa, Bacteroides plebeius
  misc_feature (1)..(377): tr|B5CZ33|B5CZ33_BACPM Isochorismate synthase OS=Bacter oides plebeius (strain DSM 17135 / JCM 12973 / M2) OX=4 84018 GN=BACPLE_01990 PE=4 SV=1
MKTPETIYHHLIDSFTHSNVSFALYRLPWTDEPILIMQEEGQPECISSLNELNQKKGFLLSPFHLTSFRPATLIRPDIQAHDWGEIKSVLQEWITRHPQYTDSHATAQESVPESYTTSEKEEKDLYTETFSRFIMPLKEKQFRKLVLSRSTTQIINEQFSPLSAFIKACNSYPRMMISLCHTPSTGTWIGSTPEIILSGHERNWHTVALAGTMPMQGEIMPTEWSKKNKEEQAFVGEYIRKAIKKFGSKLTEKGPYTARAGQLVHLKTDFHFCLKDTSHLGDVLQELHPTPAVCGLPKEEAYQFILDTEPHDRLFYSGIIGWIDPEGDTTLYVNLRCMHIENKKATLYAGGGILPDSTADAEWEETQQKMNTMRNIL

SEQ ID NO: 93479 - protein, 363 aa, Bacteroides pyogenes
  misc_feature (1)..(363): tr|A0A5D3ERV5|A0A5D3ERV5_9BACE Isochorismate synthase O S=Bacteroides pyogenes OX=310300 GN=FNJ61_04640 PE=4 SV =1
MIVEEKELSVRIEALVGEKRPFACYRLPGEENIRLLQGNIHTLRLLSGFDELNGKRGFVMAPFEVNGNFPLVLMECEQEPETVYTNWQDGGRLTGYDGDENGCKISCTKEYEACFRLFMEKLGEGVFDKLVLSRNQTVERTPGFSPVGAFRAACVRYKHSYVYLCYTPHTGLWLGSTPEILLSGERNEWHTVALAGTLPLQNGGLPHAWSEKNRKEQEYVSAYIRKQLHSLGIHAAEEGPYPVYAGALSHLKTDFRFSLHDRIRPGDLLALLHPTPAVCGLPKERAHAFILENEGYDRSYYSGFIGWMDPRGRTDLYVNLRCMHIEEENLVLYAGGGLIASSELNDEWMETEKKMQTMKRLTQ

SEQ ID NO: 93480 - protein, 373 aa, Bacteroides salyersiae
  misc_feature (1)..(373): tr|A0A4Q5FUA0|A0A4Q5FUA0_9BACE Isochorismate synthase O S=Bacteroides salyersiae OX=291644 GN=EAJ08_04520 PE=4 SV=1
MDTLEQDICAGIDRFIKLQIPFAIYRIPGENVVHFVSKDPGDSCVLLYDIEELNGQAGFVIAPFNVGPTTPIVLLRPEREMVVDFDPALKCPGGIQPDVYRQMLNNQVVSLQDGSSTEGYAGRFDVFMDALKKKEFNKLVLSRSQKVNVPLLFSPATAFYEACRRYIYSYVYFCYTPHTGAWLGSTPEIILSGERNKWNTVALAGTQSLQNGELPREWDDKNREEQEYVASYIRSQLLSLGIQPAEFGPYPAFAGALSHLKTDFHFSLPDNDSLGDLLKLLHPTPAVCGLPKEKAYQFILDHEDHERRYYSGFIGMLNPDGKTDLYVNLRCMNITSEVLTLYAGGGLLASSELEDEWQETEKKMRTMKNLIMC

SEQ ID NO: 93481 - protein, 380 aa, Bacteroides sartorii
  misc_feature (1)..(380): tr|A0A4S2FUV4|A0A4S2FUV4_9BACE Isochorismate synthase O S=Bacteroides sartorii OX=671267 GN=E5339_02215 PE=4 SV =1
MNLPDIHTQNLLDCLTHSRLGFALYRLPWTDECYLVLQTSGDVEQLADIQELNEKKGFVMAPFRISEEHPLVLIRPDVTAYDWSEISEALSSLECADALLTCKSRQSELSPFVSEETDKEQYTRAFGRFITSLQEKQFQKLVLSRSSARHIGDDFSPLGAFVRACNNYPRMMIYLCHTPASGTWLGSTPEILLSGHGKEWHTVALAGTMPMQDEVMPTDWDKKNQEEQGYVADYIRRIAKKFGNKMTEKGPYTARAGQLVHLKTDFYFLLKNTDHIGDLLQELHPTPAVCGLPKEEAFRFIPDNEGYDRSYYSGFTGWLDTEGHTDIYVNLRCMEIKLGEAILYAGGGILASSEVESEWMETGDKMNTMRSILHPDFISK

SEQ ID NO: 93482 - protein, 370 aa, Bacteroides sp.
  misc_feature (1)..(370): tr|A0A372URR4|A0A372URR4_9BACE Isochorismate synthase O S=Bacteroides sp. AM23-12 OX=2292942 GN=DW640_12335 PE= 4 SV=1
MIDEKSNLTTIDALILRKQPFAVYRVPGEKYPRLLTEDVGAVRLIYDLKELNGQRGFVIAPFRVDKSCPIVLIQSDRTGRPLPMEIVADEEQVLQSYPEESFHTLCTGKYATCFHTFIEALRDATFDKLVLSRSLTIRKNPEFSPSAVFRAACQRYIHSYIYLCYTPQTGVWLGSTPEIILSGEKNEWNTVALAGTQPLQNGKLPQVWDDKNRQEQDYVASYIRRQLLSLGIRSTESGPYPAYAGALSHLKTDFHFSLKDNKNLGDLLKVLHPTPAVCGLPKEEAYRFILENEGYDRKYYSGFIGWLDPEGRTDLYVNLRCMHIEDEQLTLYAGGGLLASSELNDEWQETEKKLQTMRRILVSAPIMMNH

SEQ ID NO: 93483 - protein, 368 aa, Bacteroides stercoris
  misc_feature (1)..(368): tr|A0A4V1YR69|A0A4V1YR69_BACSE Isochorismate synthase O S=Bacteroides stercoris OX=46506 GN=EAJ09_02245 PE=4 SV =1
MIDKEISNLKAIDTLIRQEQPFAVYRIPGEDTPRLLTQASGSVRLLYDLKDLDGARGFVIAPFRASESCPIVLIQPEQWGQPLPLGEYAEEELEAFRLRQGRETFSEACTEEYEACFRTFIEALRSKQFDKLVLSRKSVIGQCPGFSPSAVFRAACKHYIHSYIYLCYTPRTDVWMGSTPEIILSGEKNEWSTVALAGTQPLQDGRLPQEWGEKNRQEQDYVASYIRRQLLSSGIHPTESGPYPAYAGALSHLKTSFRFTLKDNNRLGSLLELLHPTPAVCGLPKEEAYRFILDNEGYDRRYYSGFIGWLDPDGKTDLYVNLRCMHIENGQLSFYAGGGLLASSELNDEWLETEKKLQTMKRLVSMSL

SEQ ID NO: 93484 - protein, 370 aa, Bacteroides thetaiotaomicron
  misc_feature (1)..(370): tr|A0A0P0EWP6|A0A0P0EWP6_BACT4 Isochorismate synthase O S=Bacteroides thetaiotaomicron OX=818 GN=entC PE=4 SV=1
MIDEKSNLTTIDALIQRKQPFAVYRVPGEKYPRLLTEDVGAVRLIFDLKELNGQRGFVIAPFRIDKSCPIVLIQSDRTGQPLPMEIVAEEEQDLQSYPEESFHTLCTGKYATCFHTFIEALRDATFDKLVLSRSLTIGKNPEFSPSAVFRAACQRYIHSYIYLCYTPQTGVWLGSTPEIILSGEKNEWNTVALAGTQPLQNGKLPQVWDDKNRQEQDYVASYIRRQLLSLGIRSTESGPYPAYAGALSHLKTDFHFSLKDNKNLGDLLKVLHPTPAVCGLPKEEAYRFILENEGYDRKYYSGFIGWLDPEGRTDLYVNLRCMHIEDEQLTLYAGGGLLASSELNDEWQETEKKLQTMRRILVSAPIMMNH

SEQ ID NO: 93485 - protein, 369 aa, Bacteroides vulgatus
  misc_feature (1)..(369): tr|A0A069SMY6|A0A069SMY6_BACVU Isochorismate synthase f amily protein OS=Bacteroides vulgatus str. 3975 RP4 OX= 1339352 GN=M099_0870 PE=4 SV=1
MDCLTHSRLGFALYRLPWTDECYLVLQTSGDVEQLADIQELNGKKGFVMAPFRISEEHPLVLIRPDVTAYDWSEISEALSSLECADALLTCKSRQSELSPFVSEETDKEQYTRAFGRFITPLQEKRFQKLVLSRSSARHIGDDFSPLGAFVRACNNYPRMMIYLCHTPASGTWLGSTPEILLSGHGKEWHTVALAGTMPMQNEVMPTDWDKKNREEQGYVADYIRRIAKRFGNKMTEKGPYTARAGQLVHLKTDFYFLLKNTDHIGDLLQELHPTPAVCGLPKEEAFRFIPDNEGYDRSYYSGFTGWLDTEGHTDIYVNLRCMEIKPGEAILYAGGGILASSEVESEWMETGDKMNTMRSILHPDFINK

SEQ ID NO: 93486 - protein, 371 aa, Bacteroides xylanisolvens
  misc_feature (1)..(371): tr|D4VPM6|D4VPM6_9BACE Isochorismate synthase @ Menaqui none-specific isochorismate synthase OS=Bacteroides xyl anisolvens SD CC 1b OX=702447 GN=BN890_6970 PE=4 SV=1
MTDEEISNLTTIDAFIQRKQPFAVYRIPGEKVPRLLTQAEGVVRLIYDLKELNGQRGFVIAPFQVSESCPVVLIQPDQWGQPLPVDDDTEEDREIALRLQGQESFLTSSTEEYTACFHTFINALRDRTFDKLVLSRHLTVDKVADFSPSSIFRAACKRYIHSYIYLCYTPQTGIWLGSTPEIILSGEKDEWHTVALAGTQPLQDGRLPQVWDEKNRKEQDYVASYIRRQLLSLDIHSTENGPYPAYAGALSHLKTDFRFSLKDNKGLGDLLKVLHPTPAVCGLPKEEAYQFILQNEGYDRCYYSGFIGWLDPGGRTDLYVNLRCMHIEDKQLTLYAGGGLLASSELNDEWLETEKKLQTIKRLIAVPPLKS

SEQ ID NO: 93487 - protein, 498 aa, Bacteroidetes bacterium
  misc_feature (1)..(498): tr|A0A2T2URY3|A0A2T2URY3_9BACT Isochorismate synthase M enF OS=Bacteroidetes bacterium SW_9_63_38 OX=1919118 GN =menF PE=3 SV=1
MPSSLPSCSHFSDHADPAGRTLAERVRAVLSETANGTTRRTRVCVPVDEPVEPIQWLRAQNQTEAVFWADRSPSTLGGDGRSLRSTACRADADGPRTVAGVGHADQVVRREQPIDYAALRRQLEGCFAHADAGLRYYGGLRFDVSQPPADRRDESLWTAFGTYRFVLPRIELIQQGDEQVLACNLVLPRDREHANAVVEAVEAVRMPSSLPQPTLPEPLRRTDRPEKEGWTRIVKWALNAISDQRLEKVVLARQVELGLERDVDPLRVLHHLKAATPGCFHFALRPSEGPTFLGASPERLFQWAGDRVVSEAVAGTRGRGATPEADAALREELLTSAKERREHAFVQQAIRDDLSTLCTSVESPETPSELMLARGRHLHARLTGTLRPDVTAVELLEALHPTPAVGGVPSDAALTAIREQEPFDRGWYAGPMGWVGPDAAEFSVAIRSGLVESTRLILFSGAGIVDGSEPEREWDEIEQKLGDFAAVLGLLGQTNGTP

SEQ ID NO: 93488 - protein, 481 aa, Baekduia soli
  misc_feature (1)..(481): tr|A0A5B8U861|A0A5B8U861_9ACTN Isochorismate synthase O S=Baekduia soli OX=496014 GN=FSW04_15630 PE=4 SV=1
MALLPITSGAGGFVLSPDAVDRLERRMAEALRRARRHGEALGAITVTVDPATDPTAVVAASRRTGEPWFCLEQPDRDGAALAALGCTVAIEASGADRFTRVAARWRALASRAACDPPDGPRGCGPVAVGGFAFAPDGGAAPHWAGYAAASLHVPEATLVRRGGDVRLTLCALACPDDTTADLVDRLLRRVGELRAATALPMLDPDPAGRYRVASAMPPEHYEQAVARGVERIRAGDLEKVVLAREVQVHAPVDHDPAAVLGVLREAFPSCHLVCAGRGDAAFVAASPELLIRRDGLRAATLALAGSTRRSADPAVDDHLGERLLRSAKDREEQAIVSRRIARTLRPHAVWVTAPDEPEVVRMANIQHLGTPIRAQLARPVSTIELAGLLHPTPAVGGEPLPVAAPLIPALEGLDRGWYAGPVGWTDLDEDGEFVVALRCALLRGPVARCYAGVGVVRDSDPAAELAETEVKLQALLPVLAA

SEQ ID NO: 93489 - protein, 502 aa, Balneola sp.
  misc_feature (1)..(502): tr|A0A3M8FPS9|A0A3M8FPS9_9BACT Isochorismate synthase O S=Balneola sp. OX=2024824 GN=ED557_12650 PE=4 SV=1
MLVNFQFILKIEKRGNKVPQVAEKKSSLSALFQKQIPESRLNRFLSELPSLDDNNLNYLAFSIQIPQIDPLAAIEQIPETNGFQYYWEKPVDDFAIAASGELYRITTRGKNRFREASRKGKELINKIHHCSGINHQNAVIHLFGGFSFFDKNESKSWSGFKSSSFTLPEWTIIKEGKCTILTICTKIKNFNEVHTNIERILSQLEPITSAEAYVLNGKQQSKSNFTVPDKTSAEYESWINSVDIAKTNISNGKFDKVVLARKIDISLDYEVKDTHILNKLRNQYPDCYSFLIRQNEHASFLGSTPERLASFTSEYVLTEGLAGSTSRGKTASEDAVLEYDLLHNPKDLEEHEIVLEAIEENLSYYSDDVKHPDQPSIKKLSNVQHLYTPITAKIKEGVSRTEVLKTLHPTPAVGGFPRNEAVEFIKEYEDFERGWYAAPFGWINAHGNGEFIVAIRSGLIMKDSVRFFAGCGIVKNSDPDKEWDETNLKFIPMLSTLEHARS

SEQ ID NO: 93490 - protein, 494 aa, Balneolaceae bacterium
  misc_feature (1)..(494): tr|A0A3D1G795|A0A3D1G795_9BACT Isochorismate synthase M enF OS=Balneolaceae bacterium OX=2053516 GN=menF PE=3 S V=1
MNSVYMQKANIKENKLYEAFKQQITQDDLEQFLSDRKDVLSDSAPQYLALSISISPVDALAAIEQDPNKEGFQYYWEKPVDQFSMAASGEIERIVTTGENRFRVSSQKGKEILSRVHHLSGINHRNAVVHLFGGFSFFDSEPESEWEAFKSASFTLPRWMIIREGNSTILTFITEMVKDQNFDELEDSIIKQLDELSCICDRDQYLQPDDLDRSLKYTNPDEYSSEHDQWVQAIEQATDKIKANEFRKVVLARKLSIPLSEEISDTRILNQLRKQYPDCYSFLIRQDDESSFIGSTPERLASFNSEFVLTEGLAGSTSRGKTASEDAMLENALMQSPKDLEEHEIVLNAISENLTDYSDKVLHPAHPQIKKLSNVQHLFTPITAQIKKGVSRTEMLKTLHPTPAVGGFPRNKAVQFIRETEDFERGWYASPIGWINAHGNGEFVVAIRSGLIKKDEVQFFAGCGIVEDSDPEKEWEETNLKFIPMLSALEYAGT

SEQ ID NO: 93491 - protein, 362 aa, Bdellovibrio bacteriovorus
  misc_feature (1)..(362): tr|Q6MHQ4|Q6MHQ4_BDEBA Menaquinone-specific isochorisma te synthase OS=Bdellovibrio bacteriovorus (strain ATCC 15356 / DSM 50701 / NCIB 9529 / HD100) OX=264462 GN=men F PE=4 SV=1
MDRQNSITLEGITNFLQAGALLRHGSQWILIEGPFTAQPTPNSVEISVFCPDFYDLTAPARWFGKARYTLSTEELRRICEVYLAQEPRTAEPLMTARWEEPRLEDFAEALSVIQSRIEKNEIQKAVPAVFARTNQTVTAQDRAQMLLKLSQAPATLFAYGFWKDGEGVLGATPETLFDFSKGVLKTMALAGTCPKSESTERESLLSDEKEMLEHRLVVEDLKERLSAWGTVQASAPYILELPTLYHLKTDISVVCQNQPNFVELVKALHPTPALGVAPRSAGYTWMKALPGQQGRRWFGGPFAFIGAEEALCLVGIRNLQWSQDSAMIGSGCGVVAASELDREWRELFQKRLSVKKILGLEV

SEQ ID NO: 93492 - protein, 325 aa, Bergeyella zoohelcum
  misc_feature (1)..(325): tr|A0A380ZTG8|A0A380ZTG8_9FLAO Isochorismate synthase e ntC OS=Bergeyella zoohelcum OX=1015 GN=entC PE=4 SV=1
MILIRFPHQKDIFTIETTENNDFSVAFFDFDQQKKVHFSGRKRMATEHDFLKIEQLFQHKNFHLHAPSTPDDYPTYEEKIKTIKEFLTEENLPKLVFSRRKYHFFEDEISIVASFQKMCNTYPQALVYLFVSEQECWMGGFYEILGKYNKKNQEFHTMSLAGTLPLNESWTEKEIQEQNTVTQYITGIIKQYTSDYQISSLKDAISGNIKHLCTEFSAIINEKEVQNLIHALHPTPAVCGTPKHLCKKKIEELETEERKLYSGYIDIASAEEKNCFVNLRCAQIYANGAKIFVGGGINEQSHPEKEWLETELKAEAILKNLVFLR

SEQ ID NO: 93493 - protein, 461 aa, Bhargavaea cecembensis
  misc_feature (1)..(461): tr|M7P550|M7P550_9BACL Isochorismate synthase entC OS=B hargavaea cecembensis DSE10 OX=1235279 GN=entC PE=4 SV= 1
MKRKTTPDLITKTGRMMDGLRFYTETVESGRLSPQAFFEAGEAEFAGRRFYWENREKTRKMAGIGHAARLTSTDGDARFEDIRTQWQRLCSVIVKEEGDQSPVLFGGFSFDPENRRKSEWESFPAALFVVPQIQLVEKDGRTFVSINLISEEEAVAADFDRLRLIRDRLIHEAQVKEREPAVKPDVSRLQEYAKQDYLRAVEGVRDGIREGGPEKVVIARSIGLDFETPVRHSEVLEHLSAEQQESYLFGLESGEGFFFGATPERLVKMEGGRGLTACVAGSIRRGKTAEEDRLLGEGLLKDPKNREEHQFVVQMIGDVFRSFCSEVRIPAGPRLLKVRDIQHLFTPVEGTPNAGTDLLDLVQALHPTPALGGTPRDEALRMIRENEKMDRGFYGAPIGWMDTDGDGEFAVAIRSGLLKGDRAHLYAGGGIVAGSVPEEEYEETWVKFRPMMRALGGVLHG

SEQ ID NO: 93494 - protein, 422 aa, Bibersteinia trehalosi
  misc_feature (1)..(422): tr|M4RHK0|M4RHK0_BIBTR Isochorismate synthase MenF OS=B ibersteinia trehalosi USDA-ARS-USMARC-192 OX=1171377 GN =menF PE=3 SV=1
MSVFTQLTQALSQQLAQNEVSAGLLRFSATVKCQPNDADLLSWLKGQACFPQMFWQQRAQRDTFVALGQVLRFQQLSAAEAFCHQHQVHLVGGIQFEGQIHFILPRLLLWQTEEQLRAELFGYADEQANLVAFLAQLDEPRTFGSTKNQVIAKKQLCSFEQWQTNIQQAISAIKTDAFDKVVLANATSWQLSSPLSGYDLLAKSRHLNQGCYHFLWAENLHECFIGSSPERLYQRQNKQLLTEALAGTVAVSHDITETAQNALWLLNDHKNLYENWLVVDDICTNLADCAGDIQVGDAHIKALKNVQHLRRFIQTELAPDIGDSQCLARIHPTAAVAGLPRTEAKQFIQQHEPFTRGWYAGTLGYFSPAQAEFCVTLRSALVRAKEMLVYAGAGIVAESEPESEWLEIERKALAMTNLVSSD

SEQ ID NO: 93495 - protein, 438 aa, Biostraticola sp.
  misc_feature (1)..(438): tr|A0A4U2UE34|A0A4U2UE34_9ENTR Isochorismate synthase M enF OS=Biostraticola sp. BGMRC 2031 OX=2575567 GN=menF PE=4 SV=1
MLSLLRSALQQHIATDIPAAPGIFQIILPWTPDGRISMLDWLNASPLFPQFYWQHRNGDLEAGACGGLKMFNRPAQAQAFLAGHADRPSLRLWGLNAFGSGAGEPDSSLFLPRLTWQRDVRTHRLIINLASDHSVLEDARHFAAQLATFVEAVPIEPLAVRETAACHQPERRQWADIISQALRALADGRFAKVVLARRTRLDLSGHVRAGALMAASKRVNRHCYHYLLRWSAQRAFLGSSPERLYRRRHNRLDTEALAGTAAVGETPAARARLADWLMNDDKNQRENLLVVDDICQRLHPAAVTLDVAPPEVIGLRTVQHLRRSIMAELDCRDDARCLSLLQPTAAVAGLPRDAARHFIAWHEPFERQWYAGSAGYLSLEQAEFNVSLRCALLENQSAWLYAGAGIIEGSDAEQEWAEIDHKADGMRTLFAASESINQ

SEQ ID NO: 93496 - protein, 426 aa, Bisgaardia hudsonensis
  misc_feature (1)..(426): tr|A0A4R2N250|A0A4R2N250_9PAST Isochorismate synthase M enF OS=Bisgaardia hudsonensis OX=109472 GN=menF PE=3 SV =1
MDTLQQIKRDLISIIKCHRPSRKEKISIFRFQVTGYLELLSWLKAQDLYPQFYLNFRDNDKKLASIGTVLSFSALNEAQQFILSNKVSLVGGMKFNNNVMFFLPRLLLEQTKDSLCIQFVINNEINWLDEKKEILELLDSLTLTKPIQDIKQTIQLQTKKASQQEWESWVEDVLREIKKGILTKVVLSNETNFVTDSPLDDKDFLAKSEKYNKDCYHFLLAENKHCTFLGSSPERLYQRNGQSLVTEAVAGTAVITDNEKQNKQQATWLLNDEKNGYENWLVVKDIKQNLFPHIEEINIQDKEIKRLRQVQHLKRRITARLKCGYLDQICLESIHPTAAVAGVPKKESKSFIQQVETFSREWYAGTLGIMAEDYAEFTVTIRSAFIEDNNIRILAGAGIVEGSVPLLEWEEIERKALGLISLLHKE

SEQ ID NO: 93497 - protein, 419 aa, Blastochloris viridis
  misc_feature (1)..(419): tr|A0A0P0IXY0|A0A0P0IXY0_BLAVI Isochorismate synthase d hbC OS=Blastochloris viridis OX=1079 GN=dhbC PE=4 SV=1
MKTQTRPEPAALPQTAPSRPAPPRHLFARPAADPGPAAPAPGERGSLFAFQSRGTLLHGLGTAAALPRGSIASLEARLATFFRAAGIEAMLAGALPFDRSADDCLWQARRVVRTAPPKQGMPCAATDAAWQLSHAPDAAGYEAAVRRALDLMAAEAGTAGGLEKIVLSRSLVTTAERDIDVAALFRRLAADPAATAFLVPLPERGGVPRVMAGATPELLVAKAGRRVSSHPLAGSARRRADLAEDAAVAARLAASDKDRQEHGIVAEFILDTLAPFCRRLFRPQGMALASTATMWHLGTRIEGELKDPEVPAAVLAAALHPTPAVCGVPREKAARHIGSLEGYARDFYAGAVGWCDGRGDGAWYVTIRCAEISGRQARLYAGAGIVPGSDPRAEAEETAAKYAALLTALGIPPLGEERS

SEQ ID NO: 93498 - protein, 416 aa, Blastococcus sp.
  misc_feature (1)..(416): tr|A0A4Y9NDJ6|A0A4Y9NDJ6_9ACTN Isochorismate synthase O S=Blastococcus sp. AZ43 OX=2559606 GN=E4P37_09975 PE=4 SV=1
MTAAALGSPEAAARTVTTVRTEAAAELLDRLPAEGALSWVRRGEGLVGWGEAARLEVTGPRALQEAADWWAAWTTGLDTDDALGVAGSGPVLFASIAFDPAVGTSVFVVPEVVLGRRGGVSWLTTVGDVDPREVLLRKRVDDGPAPRLRYADGALDPASWCAAVAAAVARIGDGDLQKVVLARDLLVSSDVPLDPRRLLRKLAARFPDCWTFAVDGLLGATPELLLRREGRQLSSRVLAGTAPRGAGADDDRLAAALIASAKDRAEHALAVESVVRALEPFCATLDAPTEPELLTLANVRHLATDVTATQRPGAGLLELVGAVHPTAAVCGTPRAEAGTLIGELEGMDRGRYAGPVGWLDARGDGEFGLALRCAELLGDDGARLFAGCGIVAGSDPASELAETQSKFAAFQAALEG

SEQ ID NO: 93499 - protein, 346 aa, Blattabacterium sp.
  misc_feature (1)..(346): tr|D0JAM6|D0JAM6_BLASB Isochorismate synthase OS=Blatta bacterium sp. subsp. Blattella germanica (strain Bge) O X=331104 GN=entC PE=4 SV=1
MYQKISIFSLYKKIIKNYWNHNRFVIFRKPNENQVFFYSHSDSDSKEEKFFIIQDFDHNYTIKIVPKKIYCSDIQKSFVRKSYEKNSFLLTDSLEYKNLIKKAIEKIRKGYFKKVVLSRSIKISFHSFYWKKTFQKLIVSYPNALVSLWYDIRHGFWIGCTPELLMQIHKRKFKTVALAGTIWNKYKWTKKEKEEHQIVIKYIIHLLKKNYNGSIVLEETKTVKMGHLKHLETPIFFYFSEEPDYYEILNKLHPTPSICGAPKKESLDFIQKHEGYTRNFYTGYIGIVNRKSMEFYIHLRCARIKEDKKEITLYAGSGITIDSDIDREYLETKNKVQNIFSQLFFK

SEQ ID NO: 93500 - protein, 392 aa, Bordetella sp.
  misc_feature (1)..(392): tr|A0A2V1K223|A0A2V1K223_9BORD Isochorismate synthase O S=Bordetella sp. 3d-2-2 OX=2175229 GN=DD235_03045 PE=4 SV=1
MTVACHAFYPEAASVADADLSRDLFFAAAGRWLLAQGGKAVPTQGGSLGERVRQALAATGDPDAVVVGAVPFDVRQPAQLWIPAHCQRGVLDEPTRLPFAAGHGGEVATMRAGTVRLMPEPAMFEALVQQALVRLEQENLRKLVLARMLSFDLDAPLDQAWLLEKLLAQHPQGHVFSVPLDAASGGGVLLGASPELLVRRQGRRITLNPLAGSAARQHEPAQDRSVAEALLRSDKDRREHAIVIEDIVRILQPYCRTLTVPDGPELLATDTLWHLSSVLEGELYDLDMTSLDLALALHPTPAVCGWPTAQAFAAIEDLEPFSRDFYAGFVGWCAASGDGEWAVTLRCGVCHPGQVRLYAGAGVVPGSVPAMERAETGVKFQTMLNGLGVTLS

SEQ ID NO: 93501 - protein, 387 aa, Bosea sp.
  misc_feature (1)..(387): tr|A0A5E8CDT7|A0A5E8CDT7_9BRAD Isochorismate synthase 1 OS=Bosea sp. EC-HK365B OX=2038386 GN=entC PE=4 SV=1
MLESLALKQNLNFKFGALFASNGRELLSSGIHEWISVPAHGGQDRGQGLHAAVEAAFERARRAGQANPILIGAIPFDVREPSCLYVPAAHEWREQAAPVQAAGEQLDVPDLLDQRSLPDEDGFKRAVEHAIVNFRHSDVRKAVLSVVRELRFAGSMDVGRLLASLRAQNSQGYLFRIPLPDEGELVGVSPELLIRKQGGRIVSNPLAGSAKRQPDPQADRAAAEQLERSQKDQYEHRLVIENIRSILAPLCAELDVPDAPSLMSTAAMWHLSTRIEGALNDPAMTALQLACVIHPTPAVCGFPTESAHKLIRYVEPFERGLFTGLVGWCDAQGNGEWAITIRCGIARRDTLRLFAGAGIVEASNPASEWEEVQAKLGTMLSACGLAA

SEQ ID NO: 93502 - protein, 435 aa, Brachybacterium nesterenkovii
  misc_feature (1)..(435): tr|A0A1X6WYM0|A0A1X6WYM0_9MICO Menaquinone-specific iso chorismate synthase OS=Brachybacterium nesterenkovii OX =47847 GN=FM110_05815 PE=4 SV=1
MSTPQNAPVPAGLPVAASCGTSPATLHVRTIRIDDDVDLLRHIPAGVSAAWLHHGQGFVGLGGAVRIENAGPARFAEASAAFRELCAGAVVDDEVRVRGTGPVALGSFSYAASSPRPSALVIPEAILGVSEGTAFLTLAALGAPPADDVCWRDLFGSTPAGAPAELEVEPDHTPREYQGMVAGAVDRIRAGAAEKIVLSETSTVTASAPLSPAVLLRRLAERFGTTWVYLAADVIGASPEMLAQTDDGRVFSRVLAGTRPVADDEGLAEDERRAFRTDAKERSEHAFAVDSVTERLADVATDVRASAEPFVLRLPGLEHLASDVSARTLPGVTSLDVAAALHPSAAVSGTPRERADGIIAELETHDRGGYAAPVGWMDARGDGQWAIALRMAHLLDERTVRLQAGGGIVGASDPVVEHAEVLAKQRPMLGALRGA

SEQ ID NO: 93503 - protein, 433 aa, Brachybacterium saurashtrense
  misc_feature (1)..(433): tr|A0A345YPH7|A0A345YPH7_9MICO Isochorismate synthase O S=Brachybacterium saurashtrense OX=556288 GN=DWV08_0956 0 PE=4 SV=1
MARMSAPHLTPDAAPVPAALHVRTVRLEEEVDLLGHVPAEVSGAWLRHGQGMVALGTAWSVQTAGPHRFTAAAAAFRQVAEHARVDDEVRVRPSGLIALGSFSYADSSPRPSTLMVPRAVLGVHDGESFLTVVGVDEEPQLPASWRDLFPSTPRDPASAPLEVEPDHTPDEYQALVQEAVAGIRAGRAEKVVLSERTTVRSPAPLSRAVLLARLARAYPSTWVYHLDDVIGASPEMLAQTEDGRVFSRVLAGSRPVADGGELDEQDRRAFRADAKERSEHAFAVDSVVERLEGLAEHLEVSPEPFVLRLPGLEHLASDVSAALRAGTTSLDVAARLHPSAAVSGTPRAEADGIIARLEPHDRGGYASPVGWMDADGDGQWAIALRMAHLRDERTAVLQAGGGLVAASDPVSEHAEALAKCRPMLRALRGEETG

SEQ ID NO: 93504 - protein, 432 aa, Brachybacterium sp.
  misc_feature (1)..(432): tr|A0A0M9UL10|A0A0M9UL10_9MICO Menaquinone-specific iso chorismate synthase OS=Brachybacterium sp. SW0106-09 OX =1704590 GN=Y09_1523 PE=4 SV=1
MSAPLTRPDLSAPASATPLVRTVRIEEPMDLLGHVPAGVSGAWLRHGQGLVAVGRAWSVRTTGPDRFAAASAAFRELASRARVDDEVRVRTSGLIALGSFSYAGTSERPSTLLVPRALLGVHDGEAFLTVVGIDEEPELPASWRDLFPSSPVDVPAASPLELEADHTPDEYQALVQQAVGEIRSGAAEKVVLSERTSVRTPEPLSPALLLTRLARAYPSTWVYHLEDVIGASPEMLAQTEDGRVFSRVLAGSRPAADDGELDEADRRAFRADRKERSEHAYAVDSVVERLEDLAAEIEVSAEPFVLRLPGLEHLASDVSARLHEGVTSLDVAARLHPSAAVSGTPRERADEIIARLEPHDRGGYAAPVGWMDASGDGQWAIALRMAHLTGERSAVLQAGGGLVAASDPVSEHAEALAKCRPMLRSLRGDAEA

SEQ ID NO: 93505 - protein, 460 aa, Bradymonadaceae bacterium
  misc_feature (1)..(460): tr|A0A3D8MXT5|A0A3D8MXT5_9DELT Isochorismate synthase O S=Bradymonadaceae bacterium TMQ3 OX=2283320 GN=DV096_00 780 PE=4 SV=1
MSPPRPQQPADRSATRLHFTVQALKEDLCLAEIFERARSFTRASYLRLPQHGAACGEELVGLGCAWEATFGDTGNDTGFASANAVLRAFRHSAGDTEDVRLFAYAAFDPSYAPGDDVTWNAFERRALYLPELLLMRRDAQLFAVIAHLDHASPTAMSEWLARVNDAQHPAQPPATDGACTSLDLRNEETRFTANVASVVASAGTSAPVEKIVYARRATAERSSHFKLDRVIAALNADFSGCATFALSPHPGAPTFVGATPETLVSAHHNQLQTMALAGTTRGGSPPQSPERAAAEDNLLHSAKDRHEHQVVVEMITSSLKHHGASPSYNDTPGIRRLTNVSHLETPIRAEITDTFGLLEAIDALHPTPAVCGQPRQAARQAIARDEGFDRGLYAGPIGAMSPEGEGQIFVALRCGLVHHDQALLFAGAGITADSDPHVEWAETHQKLAALQNALTAEDLP

SEQ ID NO: 93506 - protein, 419 aa, Bradymonadales bacterium
  misc_feature (1)..(419): tr|A0A5B8XSC9|A0A5B8XSC9_9DELT Isochorismate synthase O S=Bradymonadales bacterium V1718 OX=2600177 GN=FRD01_12 815 PE=4 SV=1
MVVPIDDVDPWSLVRAVPSHRTWRAWRGPNGDFHLAVGHAWRMSTNGRSPALDLSDLGRMLKDTPGQIATISVAFDPKRTHQKDQIWKDFAPIEISVPEVLFQRVGGRWSLTIVADAERFETVERGAKAIHQSALTGTVPEAQIEGQVEFGTYRAEVQRALEALHNEDVSKIVMARKAEFRANSEIDHARVLRRLDERFPNCFVFAHRAGGSQSGPGAVFLGASPERLVACDSGTLHTEALAGSAGVGQSETERSELANALMKSEKDLREHHHVVDYIQEILGPITSGFELGELGVKSLKNVQHLHTPIRAKLKEGATILDAVKVLHPTSAVGGSPRERALELIAEIEGFDRGWYAGALGWMGLGDSTDGELTVAIRSAMIRKNIAELYAGAGIVVGSDPVAEDQETRVKMRALLEALE

SEQ ID NO: 93507 - protein, 443 aa, Bradymonas sp.
  misc_feature (1)..(443): tr|A0A4Y6Q1K1|A0A4Y6Q1K1_9DELT Isochorismate synthase O S=Bradymonas sp. YN101 OX=2589075 GN=FIV42_27750 PE=4 S V=1
MTRPLSQLSAPGQLAAKVFETEHTDLLDLYRRASGRASSFYRRNSQGTEVLGLGVALQFVADDADDATMAELHERLSERLADVSGDTSKLRIFGWTAFDVANSRRAHAGLPDWSAYARRQLYVPQVLLRCRDGKTDAVVLAEPADVDETWAAWQETFRSTVEIPSPSATEPEVRWLDQDEFRRGVGLVTDERVAPKVVLARRAHIEAAAPIDTTTVLRRLTHAYPSCSVFALSPHAESPYPVFAGATPETLARVNDGHVETMALAGTSRNDAGQAPDLAAERALLSSQKDLDEHRFVLDMIVDALEPLCSSVAADPEPRPHRLANVSHLMTKISGELAEDVGLAEVVDALHPTPAVCGTPRDLAKRLIGEIEGFDRGLYAGAFGSMDLEGNGQFDVALRCGLIDGASALLFAGAGITADSDVDVELTETRSKFAPLLDAISKE

SEQ ID NO: 93508 - protein, 377 aa, Bradyrhizobium sp.
  misc_feature (1)..(377): tr|A0A5E8VQI5|A0A5E8VQI5_9BRAD Isochorismate synthase O S=Bradyrhizobium sp. LVM 105 OX=2341115 GN=D6B98_00475 PE=4 SV=1
MKTAGETMLALGQIATLGDGPLADLAARAAGFFEKRTEGPDVLVGALPFDPGRPSHLVQPERVLRVQGRHDIGAIPGLDGLASARAGAAGILSVDADPAAAEFAHAVAVALGQLTAADASLRKVVLSRSLKVTANRDFSAADLMRRLSADDSVTVFATPLPTRGHQRRSLIGATPELLVEKRGGQICSHPLAGSARRHRDTEEDRKAGAGLLASDKDRREHKLVVESVLDTLAPYCVGLSAPEGTCLRATSSMWHLGTRIVGQLKDASLSSIYFAGLLHPTPAVCGLPRRLAHDQIVKLEPYDREFYAGAVGWCDSAGDGRWHVSIRCAEIEGRHARLYAGAGIVPGSTPEGELAETSAKFRAMLDAFGIDGSRFDA

SEQ ID NO: 93509 - protein, 442 aa, Brenneria alni
  misc_feature (1)..(442): tr|A0A421DTH0|A0A421DTH0_9GAMM Isochorismate synthase M enF OS=Brenneria alni OX=71656 GN=menF PE=3 SV=1
MKQLSDLLRHMQQDLRQPQPASAGFRQITRSLTISEPSELLPWLATQPVYPQFYWRHRQESEEAAVCGRVCGFQHIQAAEAFLLQQGCGRNVRIWGMNAFNQTPGERGPAVSPSYLFLPRVEWRRQGNKLSLQINLFSETSLQQDADEASAFVNLLLPGRPLLPLQAEIRTVDHLPDRQNWINLLQQTLLDIAAGELKKVVLARATTLTLKQPLPATTLMAASRAANHHCFHFMLAHDARQAFLGSSPERLYRRKDTQLETEALAGTVASDKDESRAAALANWLMKDTKNQCENRLVVEDICQRLRQSALSLNVMPPEIVRLRKVQHLRRTIQAVLRERSDVVCFNNLHPTAAVAGFPRAVARRFIAGHEPFDRGWYAGSAGYLSRQQSEFCVALRSAEISDNVLKLYAGAGIVAGSDPEQEWQELENKAAGLKSLLEGDIS

SEQ ID NO: 93510 - protein, 431 aa, Brenneria goodwinii
  misc_feature (1)..(431): tr|A0A0G4JPF9|A0A0G4JPF9_9GAMM Isochorismate synthase M enF OS=Brenneria goodwinii OX=1109412 GN=menF PE=3 SV=1
MQQALRKPQPINAGFRQITHSLVISEAAELLPWLATQPVYPQFYWQHRQDNEEAAVCGRVCGFHHIQDAEAFLTRQKCARNVRIWGLNAFNQTSQRAQGASPSYLFLPRVELLRQGNTLSLQINLYSETSLQQDAEEASAFINFLLPMRPQPPLQTQIEKIEHQPDRQRWGSLLQLALRDIAAGAMEKVVLARATTLTLDRPLQATTFMAASRAANHRCFHFMLAHDARQAFLGSSPERLYRRCDERLETEALAGTAASDKDANKTAALADWLMKDTKNQCENMMVVDDICQRLRRSARSLDVMPPEIIRLRKVQHLRRAILAELKERSDAVCLDDLQPTAAVAGLPRAVARRFIAEHEPFERGWYAGSAGYLSLQQSEFCVALRSAEISDNILKLYAGAGILAGSDPEQEWLELENKAAGLKSLLEGDMS

SEQ ID NO: 93511 - protein, 444 aa, Brenneria roseae
  misc_feature (1)..(444): tr|A0A2U1U0A5|A0A2U1U0A5_9GAMM Isochorismate synthase M enF OS=Brenneria roseae subsp. americana OX=1508507 GN= menF PE=3 SV=1
MKQLSDLLWHMQQDLREPQPESAGFRQITRSLILSEREPSGLLSWLATQPAYPQFYWQHRQDDEEAAVCGLVCGFHHAQEAEDFLLQHGCDSHVRIWGLNAFDQTPREYRSGISPSYLFLPRVELLRQGNTLSLRINLFSGASLQQDADEASAFIKFLLPIRPLPPLQAEVDVVDHRPDRQNWIKLLQQALHNIATGEMEKVVLARKTTLTLKQPLQATTFMAASRAANHHCFHFMLAHNARQAFLGSSPERLYRRDDTRLETEALAGTVASDKDDEKAAAFAHWLMKDTKNQCENMLVVDDICQRLQQSALSLDVMPPEVVRLRKVQHLRRAIQATLRQPSDVVCLDNLQPTAAVAGLPRRVARRFIAEKEPFERGWYAGSAGYLSRRQAEFCVALRSAEINNNILTLYAGAGIVAGSDPEQEWQELENKAAGLKSLLDGDMS

SEQ ID NO: 93512 - protein, 442 aa, Brenneria rubrifaciens
  misc_feature (1)..(442): tr|A0A4P8QQZ0|A0A4P8QQZ0_9GAMM Isochorismate synthase M enF OS=Brenneria rubrifaciens OX=55213 GN=menF PE=3 SV= 1
MKQLSDLLRDVQQDLCQPQPENAGFRQITGSLTLGEPIDLLSWLATQPAYPQFYWQHRQDSEEAAVCGQVCGFHSIEEAESFLLRQGCDRHTRIWGLNAFDRSAREHGAGISSSSLFLPRVELLRQNHTLSLRINLFSETSLQQDADDAAAFIKLLLPMRPLPPLQAEVCAVSHLPDRRNWIKLLQQTLGRIAAGEMEKVVLARKTTLTLKQPLQATTFMAASRAVNHHCFHFMLAHDARQAFLGSSPERLYRRRETRLETEALAGTVASGKNDETAAALAHWLMKDTKNQCENMLVVDDICQRLRQSALSLDVRPAEVVRLRKVQHLRRIIQATLRKQSDAACLEDLQPTAAVAGLPRPPARHFIAENEPFARGWYAGSAGYLSRCQSEFCVALRSAEISDHILSLYAGAGIVAGSDPEQEWQELESKAAGLRSLLDGVMS

SEQ ID NO: 93513 - protein, 432 aa, Brenneria salicis
  misc_feature (1)..(432): tr|A0A366IBL0|A0A366IBL0_9GAMM Isochorismate synthase M enF OS=Brenneria salicis ATCC 15712 = DSM 30166 OX=7143 14 GN=menF PE=3 SV=1
MQQDLRQPQAEHAGFRQITHSLTLSEPSDLLSWLATQPAYPQFYWRHRQDSEEAAVCGQVCGFHHIQEAEDFLVRHGGDHPVRVWGLNAFDQSPRDPRTGTSPGYLFLPRVELLRQENTLSLRVNLFSETSLRQDADKAAAFIKFLLPMRPLPPLQTQASDVEHQPDRQQWRNLLQQALHNIAAGEMEKVVLARKTTLTLKQPLQATTFMAASCAANHHCFHFMLAHDARQAFLGSSPERLYRRHDTQLETEALAGTVVSDKCDEKAAALAQWLMKDSKNQCENMLVVDDICQRLRQSALSLDVMPPEVVRLRKVQHLRRTIQATLRQPSDSVCLDDLQPTAAVAGLPRHIARRFIIGNEPFDRGWYAGSAGYLSRRQAEFCVALRSAHIHDNRLILYAGAGIVAGSDPEQEWQELENKTAGLKSLLDGDML

SEQ ID NO: 93514 - protein, 375 aa, Brenneria sp.
  misc_feature (1)..(375): tr|G7LM41|G7LM41_9GAMM Isochorismate synthase OS=Brenne ria sp. EniD312 OX=598467 GN=BrE312_3977 PE=4 SV=1
MGTPFHHHSFLFSSAFRSLYTEGVFKTLTWPASDPSALCQKVAHGFEQARLAGITRPIVVGAIPFDVRQPSSLYIPHACHFLSREAFKQKLSATPQTPLRIVDQQPHPQREYFLAMVESAVNAIRQGELQKIVLSRLQSVQVEHPLNTIALLATLAEQNPNGYYFHLPLAEKRYLFGASPELLLRQQGRSIWSTPLAGTAKRAADERQDRDSRDRLLTSRKDRHEHQLVIEEIRQTLAGYCSSLSIPPQPELLPTPNLWHLASPIAGELKADNSQSLSLAGLLHPTPALCGVPKEKARRLISELEPFERGVFGGIVGWSDDEGNGEWAVTIRCGISQQQHIQLYAGAGIVADSDPAAEWLEIEAKMRTMLRALGQ

SEQ ID NO: 93515 - protein, 997 aa, Brevibacillus laterosporus
  misc_feature (1)..(997): tr|H0U6D6|H0U6D6_BRELA Salicylate synthase OS=Brevibaci llus laterosporus GI-9 OX=1118154 GN=dhbE PE=4 SV=1
MKATTEWFEDTAKNYEQLGFWEPKTLGQQLRIWAQQYQNREALVEGDSRLTYKELDNQVDELASGFIQMGIKKGDNVAVQLPNRISFVLTCFALFRIGALPILVLPAHREAELDGIFTLAKPVAYIIPTTFLGFDYTKMAQQLVKKHPSVKFVMTDGESDIGINLADISGTPAELDVPSYKDTALLLLSGGTTGTPKLIPRTHADYAYNAKAAATRCKLTPQSVYLAVLPIAHNFPLCCPGILGTLSAGGKVVLCQTTSCDEAFPLIEKERVTITALVPSIVQVWLEVLEWDTSNDLSSLEVLQVGGSMLDENLAKRVIHEMKCKLQQVFGMAEGLICCTSLDDPESVIISCQGRPLSDADEVRIVDEYGNDVEAGAYGELIVRGPYTISGYYRAPEQNRESFTPDGFYRSGDKARITPEGNFQIGGRIKEQINRAGEKIMPAEVEAYLRMHPDIKDAALITLPDPTLGEKSCAYVITDNQDITLADIHAFFHEKGVARYKMPDQIEFIDYWPLTSVGKVNKAKLKELATAPKSHATTCEVSYLEETIAFEGDVHLAASQIVEQGLYENYLLYENGDELSLGMGIHALLTVDEQHTTLAYDNQTIRFENNLLSATIDKAFASIPLKNWRAYGTVNFGMARYYQNLPLLSEAGRLIKLFIPEVEIRFTKGSILLRALREEKRNEFADLLRKLRENGLDDEKDTLVQRVVSQKLDVPEVDTYGAEAYMQGVAEAVREIKERKYHKVILSRKIPIHQELDMVASYIAGRRVNTPARSFLLSLDGLHVAGFSPETVVEVDSNGWVSTFPLAGTRSRGRNEDEGDKLKDELLNDPKEIAEHAVSVKLAFEELKSVCDSTTILLSDFMSVASRGTVQHIASRLKGKIKPEFNSWDAFRALFPAVTASGIPKKESIDAIGRLESEPRNLYSGCVMTFDSDGAMDAALVLRTIYQQNNSAWLHAGAGVVEMSLPTRELEETREKLSSFSRQLVVSSREVEKVKPV

SEQ ID NO: 93516 - protein, 454 aa, Brevibacterium antiquum
  misc_feature (1)..(454): tr|A0A2H1K6L8|A0A2H1K6L8_9MICO Isochorismate synthase O S=Brevibacterium antiquum OX=234835 GN=BANT10_02737 PE= 4 SV=1
MTTTFTTSDICAAPPRLHVRSRFVDDVEPGPGFPFESGLPTTVEQTLELLPTSAFSCWVRDTSGLIGFGRTLRIRARGRARFTELSEAWKAITGAATIEDEVDLLGSGLMCFATVAYSGESEVDSLIHVPEFVLGRRGGRVWMTSIIAEGATPTPPVLKSEPLHRVTSAKSSPGDLDAATWANLVATVSRMLTPVGDSAEVDAFADDSTLRKIVLARDELVTTDDDIDVRSVLGALNRSYPSCWTFNVAGLIGSTPELLIGVENNRVTSRVLAGTYRVENDPTTEMPAARKLLSAHKDSTEHAFAIASLQRSLGLVAGDVSVDERPHLLPLANVIHSASDASAHLPEDSCLNALDIAAAVHPTAAVGGYPQASAVAHVDELEPLDRGRYSGPVGWMDDRGNGQFGIALRCGQLEDRNRIRLFAGAGIMPDSDPLAEVAETDAKFAPMRRALGLE

SEQ ID NO: 93517 - protein, 454 aa, Brevibacterium aurantiacum
  misc_feature (1)..(454): tr|A0A2A3YQW4|A0A2A3YQW4_9MICO Isochorismate synthase O S=Brevibacterium aurantiacum OX=273384 GN=BAURA63_01408 PE=4 SV=1
MTTTFSTSDICTAPPRLHVSSRFVDDVEPGPGFPFESGLPTSVEETLELLPTSAFSCWVRDTSGLIGFGRTLRIRARGRDRFTELSKAWKAITDAASIEDEVDLLGSGLMCFATVAYSGESEVDSLIHVPEFVLGRRGGRVWMTSIITEGATPVPPVLKSEPLRRVTSATSSPGDLDSSSWADLVAKVSQMLTPVGDSAEVDPFTEDSTLRKIVLARDELVTSDDDIDVRSVLGELNRSYPSCWTFDVAGLIGSTPELLIGVENARVTSRVLAGTYRVENDPTSEMPAARKLLSAHKDSTEHAFAIASLQRSLSSVADDVSVDERPHLLPLANVIHSASDASAHLPEDSCLNALDIAAAVHPTAAVGGYPQASAIAHVDELEPLDRGRYSGPVGWMDDRGNGQFGIALRCGQLEDRNRIRLFAGAGIMPDSDPLAEVAETEAKFAPMRRALGLE

SEQ ID NO: 93518 - protein, 454 aa, Brevibacterium casei
  misc_feature (1)..(454): tr|A0A2H1IS52|A0A2H1IS52_9MICO Isochorismate synthase O S=Brevibacterium casei CIP 102111 OX=1255625 GN=BC10211 1_01522 PE=4 SV=1
MTTTLSSSDITADTPRLTVRSRFVDDVDPGPGFPFESGLPTTVEQTLALLPTSAFSCWVRDTSGLIGFGRTLRIRARGRNRFTELSEAWKAITAVAVIEDEVDHLGSGLMCFATVTYSQDSEVDSLLHIPEFVLGRRGGRVWMTTIAAEGATPVPPVLREEALRPVTSASESPGDLDEETWADLVATVSAMLTPVGSPTEVDPASDDATLRKVVLARDEVVTTDEEIDVRSVLGALNRSYPSCWTFDIAGLIGATPELLIGVEHGRVTSRVLAGTYRVEEDPTAEMAEARKLLSAHKDSTEHAFAIASLQRSLGSVAADVSVDDRPHLLPLANVIHSASDATGHLPEDSGLNALDVAAAVHPTAAVGGYPQASAVALVDELEPLDRGRYSGPVGWMDDRGNGQFGIALRCGQLEDRNRIRLYAGAGIMPDSDPAAEVAETEAKFAPMRRALGLI

SEQ ID NO: 93519 - protein, 456 aa, Brevibacterium iodinum
  misc_feature (1)..(456): tr|A0A2H1JXA1|A0A2H1JXA1_9MICO Isochorismate synthase O S=Brevibacterium iodinum ATCC 49514 OX=1255616 GN=BI495 14_02427 PE=4 SV=1
MTTTFGTSDILSAPPRLHVRSRFVDDVDPGPGFPFESGLPTTVEQTLELLPTDGFSCWVRDTSGLIGFGRTLRIRARGPERFTELSDAWKAITEAAAVEDEVDLLGSGLMCFATVAYSGESAVDSIIHVPEFVLGRRGGRVWLTSISAAEEPPLPPILHAEPLQRVHSARAETGELDPDKWSRLVEQVAAMLTPIDNSAEVDAFSDDPTLRKIVLARDEVVTTEEDIDVRAVLGALNRSYPSCWTFDIAGLIGSTPELLIGVENNRVTSRVLAGTYRVENNPMEEMPAARKLLSAHKDSTEHAFAIASLQRSLGSVAEDVTVDERPHLLPLANVIHSASDAQANLSPDSGLTALDVAASVHPTAAVGGYPQASAVAHVDELEPLDRGRYSGPVGWMDGRGNGQFGIALRCGQLEDRNRIRLYAGAGIMPDSDPVTEVAETNAKLAPMRRALGLDRD

SEQ ID NO: 93520 - protein, 473 aa, Brevibacterium jeotgali
  misc_feature (1)..(473): tr|A0A2H1L152|A0A2H1L152_9MICO Isochorismate synthase O S=Brevibacterium jeotgali OX=1262550 GN=BJEO58_00090 PE =4 SV=1
MTHSSRTSDPTPRLTVRSWFVDGLAPDAPPPFAGNIPTSSLDFLAQLPTSGFACWVRGRSGLVGIGRRLRLHARGEHRFHDLARQWDDLVAAAVVDDRVSLMGSGLVGFSAISFAADSGVDSVIDVPEYILGRRDGRVWLTHVRDGDDGACGHSPDDRSAGSEDVDAPSDELVAGLQLTPTPLRDQRIVTREPGRVSPERFEEIVALAASRLRSPEAGERKIVLARDEVITAEDDIDVRTVLGRLNAEFPSTWAFLVAGLVGATPELLIGVEDGAVHSRVLAGTYRVQEDPEKEVADAREHLGGRKDSVEHSYAIDSLASTLGPVTEELHVDPEPHLLQLANVIHLASDAHGRLSTRADGSRISPFEVAHAVHPTAAVGGTPRARAMDLISRFEEMDRGRYAGPVGWVDGYGNGQFGIALRCGQLEERNRIRLFAGAGIMPDSDPESERRETDAKFAPMRRALGVEWSPDTSH

SEQ ID NO: 93521 - protein, 456 aa, Brevibacterium linens
  misc_feature (1)..(456): tr|A0A0B9AXT1|A0A0B9AXT1_BRELN Isochorismate synthase O S=Brevibacterium linens OX=1703 GN=AE0388_0370 PE=4 SV= 1
MTTTFGTSDILSAPPRLHVRSRFVDDVDPGPGFPFESGLPTTVEQTLELLPTDGFSCWVRDTSGLIGFGRTLRIRARGPKRFAELSDAWKAITEAAEVEDEVDLLGSGLMCFATVAYSGESAVDSIIHVPEFVLGRRGGRVWLTSISTAEVPPLPPILHAEPLQRVQTARAEAGELDPEKWSRLVEQVADMLTPIDTSAEVDAFSDDPTLRKIVLARDEVVTTDEDIDVRAVLGALNRSYPSCWTFDIAGLIGSTPELLIGVEDNKVTSRVLAGTYRVEKNPMDEMPAARKLLSAHKDSTEHAFAIASLQRSLGSVAEDVTVDERPHLLPLANVIHSASDAQATLADDSGLNALDVAAAVHPTAAVGGYPQASAVAHVDELEPLDRGRYSGPVGWMDGRGNGQFGIALRCGQLEDRNRIRLFAGAGIMPDSDPATEVAETNAKLAPMRRALGLDRG

SEQ ID NO: 93522 - protein, 452 aa, Brevibacterium mcbrellneri
  misc_feature (1)..(452): tr|D4YQ44|D4YQ44_9MICO Isochorismate synthase OS=Brevib acterium mcbrellneri ATCC 49030 OX=585530 GN=menF PE=4 SV=1
MKDVNGETNAETLTVRPGDTVPTLSVRSWFVDGVTPESPAPFVGGLPATSMEFLTQLPTDTLACWVRGNSGLVGFGRAVRIRARGANRFSDLSTMWRSISGNATVDNPVRLPGSGLVGFTTIAFAEDSQAESVIDIPQFIMGRRDGRVWLTAVNVTGTPHTELKLRDVALQTPRDPQVHDGHVSGERYTRAVTEAIEIMQSGRASKIVVAQDAVVETSNDIDVRALVGALNQAYPSTWTFCVAGMVGATPELLISRSGDRVESRVLAGTYRVAHDPRSELAAARAQLGGAKDTAEHRYAIDSLAQTLKPLCSELEVDPEPHLLALSNVIHLASDAHGVVKPGHTLLDVAQAVHPTAAVGGVPREAAWEHIAHVEKADRGRYAGPVGWIDGNGDGQLGIALRCGQLESRNKIRLWAGCGIMPDSDPASELAETRAKLTPMMTALGVAHLIDQV

SEQ ID NO: 93523 - protein, 447 aa, Brevibacterium ravenspurgense
  misc_feature (1)..(447): tr|A0A150H943|A0A150H943_9MICO Isochorismate synthase E ntC OS=Brevibacterium ravenspurgense OX=479117 GN=entC PE=4 SV=1
MLSDSVSLRVRSWFIDGVDPHAPAPFAHGLPSTVHEFLAQLPQDTFNCWVRGHSGLVGFGRVARLRATGGETVEGRTRFDQLSQQWRAVAQRALVEDSVNLPGSGLVGFTAISFTDDSDTDSVIDIPRFIMGRRHERVWLTSISQEGSADDDFTLEAAALTPVTGASLHDGHISQEQHIRNVSEAVKLMRAPGSQFKKIVVARDAVVDTEHDIDVRAVLGALNAAYPATWTFNVAGLIGATPELLVGVQDGVVRSRVLAGTYQVRDDAQAELAQARQQLAGAKDSQEHVYATRSLEECLRPYSSDLHVDEQPYLLTLPNVIHLASDAHGTLDSPSGRPEDRPSIIDLAKSIHPTAAVGGVPRNEAMREIARIERADRGRYAGPVGWIDGAGNGQLGIALRCGQLESRTRIRLWAGGGIMPDSDPQSELAESWAKLGPMLQAHGLSRP

SEQ ID NO: 93524 - protein, 460 aa, Brevibacterium sp.
  misc_feature (1)..(460): tr|A0A2H1IPQ4|A0A2H1IPQ4_9MICO Isochorismate synthase O S=Brevibacterium sp. Mu109 OX=1255669 GN=BSP109_01376 P E=4 SV=1
MPHTSAPSASTPRLTVRSWFVDGLTPDAPPPFSGNIPTSSLDFLTQLPTSGFACWVRGRSGLVGIGRRLRLRARGEDRFHDLARQWDELVAAAEVDDRVALMGSGLVGFSAIAFAADSGVDSVIDVPEYILGRRDGRVWLTHVGGDEDPTQPAAQSDELIAGLQLTPTPLRDQRIVSRAPGHVSPERFEEIVALAASRLRSPEAGERKIVLARDEVITAEDDIDVRTALGRLNAEFPSTWTFLVAGLVGATPELLIGVEDGAVHSRVLAGTYRVQDDPEKEVARARAHLGGRKDSVEHSYAIDSLASTLGPVTEELHVDPEPHLLQLANVIHLASDAHGRLSTRADGSRISPFEVAHAVHPTAAVGGTPRARAMDLISQFEEMDRGRYAGPVGWVDGYGNGQFGIALRCGQLEERNRIRLFAGAGIMPDSEPESERRETDAKFAPMRSALGVDWSPDTSH

SEQ ID NO: 93525 - protein, 460 aa, Brevibacterium yomogidense
  misc_feature (1)..(460): tr|A0A1X6XJH9|A0A1X6XJH9_9MICO Menaquinone-specific iso chorismate synthase OS=Brevibacterium yomogidense OX=94 6573 GN=FM105_09390 PE=4 SV=1
MPHTSAPSASTPRLTVRSWFVDGLTPDAPPPFAGNIPTSSLDFLTQLPTSGFACWVRGRSGLVGIGRRLRLRARGEDRFHDLARQWDELVAAAEVDDRVALMGSGLVGFSAIAFAADSGVDSVIDVPEYILGRRDGRVWLTHVGGDEDPTQPAAQSDELIAGLQLTPTPLRDQRIVSRAPGHVSPERFEEIVALAASRLRSPEAGERKIVLARDEVITAEDDIDVRTVLGRLNAEFPSTWTFLVAGLVGATPELLIGVEDGAVHSRVLAGTYRVQDDPEKEVARARAHLGGRKDSVEHSYAIDSLASTLGPVTEELHVDPEPHLLQLANVIHLASDAHGRLSTRADGSRISPFEVAHAVHPTAAVGGTPRARAMDLISQFEEMDRGRYAGPVGWVDGYGNGQFGIALRCGQLEERNRIRLFAGAGIMPDSEPESERRETDAKFAPMRSALGVDWSPDTSH

SEQ ID NO: 93526 - protein, 415 aa, Brevundimonas diminuta
  misc_feature (1)..(415): tr|A0A1R4G8J8|A0A1R4G8J8_BREDI Isochorismate synthase o f siderophore biosynthesis OS=Brevundimonas diminuta 3F 5N OX=1255603 GN=FM111_10435 PE=4 SV=1
MESRVAEFWGAPDLSVQIGGGASERHDAVAPKGGADWAFGLSTPELRLFTTGLKQRLTPGPATTLGERVRRFFADLPVAPETDEPSPRLLVGALPFDRNADDCLFLPERAANRIWDMPSTASRPSILALTPEPSRAAYEAAVTQALAAMRASQGGAEPVDKVVLSRSLKVQGDGAIDPFALWRDLKADPTAARFLTPLGAGQGGAMRRLVGATPELLASKRGPAVFSHPLAGSARRSTDVVQDEAAAQSLLASDKDRREHALVVEAIMDLLAPYCSDLRAPPGPALVSTRTMWHLGTRIEGRLHRPDEVSAAELAALLHPTPAVCGSPRDQAAEMIHALEGYDRGFYAGAVGWTNAFGDGAWYVSLRCAETCGDQARLYAGAGIVEGSDPAAEADETSGKFQAVLRALGVDEASV

SEQ ID NO: 93527 - protein, 427 aa, Brevundimonas naejangsanensis
  misc_feature (1)..(427): tr|A0A4P7BT74|A0A4P7BT74_9CAUL Isochorismate synthase O S=Brevundimonas naejangsanensis OX=588932 GN=E3U41_0769 5 PE=4 SV=1
MICNSLSAAGISMELRVAEFWGAPDLSVQIGGGASERQEAAAPKDDMDWAFGLSTPELRLFTTGLRQRLTPGPAATLGARVRGFFADLPVPPETDEPSPRLLVGALPFDRRADDCLFLPERAANRIWDMRSSAPRPSIRALTPEPSRAAYEAAVTQALAAMRASHGGAEPINKVVLSRSLKVQGDGAIDPFALWRDLKADPTAARFLTPLGKGSRGAMRRLVGATPELLVSKRGPAVFSHPLAGSARRSVDVVQDEAAAQSLLASDKDRREHALVVEAIMDLLAPYCSDLRAPPGPALVSTRTMWHLGTRIEGRLHRPDETSAAELAALLHPTPAVCGSPRDRAAEIIHALEGYDRGFYAGAVGWTNAFGDGAWYVSLRCAETCGDQARLYAGAGIVEGSDPAAEADETSGKFQAVLRALGVDEASV

SEQ ID NO: 93528 - protein, 431 aa, Brevundimonas sp.
  misc_feature (1)..(431): tr|A0A399ULI3|A0A399ULI3_9CAUL Isochorismate synthase O S=Brevundimonas sp. LPMIX5 OX=2305887 GN=D1604_04640 PE =4 SV=1
MICNSLSAAGTSMESRVAEFWGAPDLSVQIGGGASERQEVAAPKDDMDWAFGLTTPELRLFTTGLKQRLTPGPAATLGARVRRFFADLPVAPETDEPSPRLLVGALPFDRKADDCLFLPERAANRIWDMPSSASHPSIRALTPEPSRAAYEAAVTQALEAMRASQGGAEPVDKVVLSRSLKVQGDGAIDPFALWRDLKADPTAARFLTPLGEGQKTGQGGAMRRLVGATPELLASKRGPVVFSHPLAGSARRSTDVVQDEAAAQSLLASDKDRREHALVVEAIMDLLAPYCSDLRAPPGPALVSTRTMWHLGTRIEGRLHRPDETSAAELAALLHPTPAVCGSPRDRAAEMIHALEGYDRGFYAGAVGWTNAFGDGAWYVSLRCAETCGDQARLYAGAGIVEGSDPAAEADETSGKFQAVLRALGVDEASV

SEQ ID NO: 93529 - protein, 415 aa, Brevundimonas vancanneytii
  misc_feature (1)..(415): tr|A0A4P1KEX0|A0A4P1KEX0_9CAUL Isochorismate synthase d hbC OS=Brevundimonas vancanneytii OX=1325724 GN=dhbC PE =4 SV=1
MESRIAEFWGAPDLSVQIGGGASERHEAAAPKDDMDWAFGLSTPELRLFTTGLKQRLTPGPAATLGERVRRFFADLPVAPETDEPSPRLLVGALPFDRSADDCLFLPERAANRIWDMPSGAHRPAIRALTPEPSRAAYEAAVTQALEAMRASQGGAEPVDKVVLSRSLKVQGDGAIDPFALWRDLKADPTAARFLTPLGQGQGGAMRRLVGATPELLASKRGPAVFSHPLAGSARRSTDVVQDEAAAQGLLASDKDRREHALVVEAIMDLLAPYCSDLRAPPGPALVSTRTMWHLGTRIEGRLHRPDETSAAELAALLHPTPAVCGSPRDRAAEMIHALEGYDRGFYAGAVGWTNAFGDGAWYVSLRCAETCGDQARLYAGAGIVEGSDPAAEADETSGKFQAVLRALGVDEASV

SEQ ID NO: 93530 - protein, 491 aa, Brochothrix thermosphacta
  misc_feature (1)..(491): tr|A0A2X0QK95|A0A2X0QK95_BROTH Putative menaquinone-spe cific isochorismate synthase MenF OS=Brochothrix thermo sphacta OX=2756 GN=BTBSAS_240019 PE=4 SV=1
MRSNSFSLFIWSIYIGAIYLMKLANKVTESIKQAVEQARKTENAVLLSIITPIEEINFPKVLINLPQTEDAFYWQTPDDSLEFTGIKTAAVFNEKMMSATGVQQEWSQLLKDAVISDQDKANSGLPLLFGGFSFDDKAETTGTIWSVFGKQLFLLPELMFMRKEKLNTLTINCIVQADDTFMSIEKKLNNSYAQARTLNITSEKERTPLIIKKIEDLITPTDWDKMLNKGIEHIEAGVFTKVVLARQKEIVFNRSLHIGELMAALLLQQPNCYRYLLRYQGTSFLGASPERLLYKEGQSIYSAGVAGSIAAGKTEEQRQMYADELLADPKNLHEHEIVVSMITNKLAGLCHDLNYSSQPQILSNRDIQHLYTPIKAELNSGMSFLTLVKQMHPTPALGGFPSKKTVEWIAKEEPLIRGFFGAPIGWYDSNENGEFAVGIRSLAAQEKTARLFAGCGIVADSVPENEWHETAMKFQPMLRLLGGTDNDTASN

SEQ ID NO: 93531 - protein, 391 aa, Brucella abortus
  misc_feature (1)..(391): tr|Q2YL94|Q2YL94_BRUA2 Isochorismate synthase:Anthranil ate synthase component I and chorismate binding protein OS=Brucella abortus (strain 2308) OX=359391 GN=BAB2_00 15 PE=4 SV=1
MRTSALKYPTSDADHLIENNTYFSFSSGNLKLAASGMREVIATPAIGGSNPDSTFQRAIAQAFERAARAGQRNPIVVGAIPFDPGEPSCLYVPEEMDWQEREPASGASAAAMPQLAGQRSVPDEAGFKHAVEHAIINFRLSDVRKAVLSVMRELTFADDIDVDAMLANLRAQNHDGYQFRVPLPGGGALVGVSPELLIHKDKGKIVSNPLAGSAKRMADPEADRKNADRLAKSEKDHYEHRLVIEDIRARLQPICTELDIPERPSLIHTAALWHLSTRIEGRLHDPDMTALQLACLIHPTPAVCGFPTERARRLIRFVEPFERGLFTGMVGWSDAEGNGEWVVTIRCGTVKGNLVRLFAGAGIVEASSPDSEWAEVQTKLGTMLRACGLSA

SEQ ID NO: 93532 - protein, 391 aa, Brucella melitensis
  misc_feature (1)..(391): tr|A0A4P6KQE3|A0A4P6KQE3_BRUML Isochorismate synthase O S=Brucella melitensis OX=29459 GN=EXD79_11095 PE=4 SV=1
MRTSALKYPTSDADHLIENNTDFSFASGNLKLAASGMREVIATPAIGGSNPDSTFQRAIAQAFERAARAGQRNPIVVGAIPFDPGEPSCLYVPEEMDWQEREPASGASAAAMPQLAGQRSVPDEAGFKHAVEHAIINFRLSDVRKAVLSVMRELTFADDIDVDAILANLRAQNHDGYQFRVPLPGGGALVGVSPELLIHKDKGKIVSNPLAGSAKRMADPEADRKNADRLAKSEKDHYEHRLVIEDIRARLQPICTELDIPERPSLIHTAALWHLSTRIEGRLHDPDMTALQLACLIHPTPAVCGFPTERARRLIRFVEPFERGLFTGMVGWSDAEGNGEWVVTIRCGTVKGNLVRLFAGAGIVEASSPDSEWAEVQTKLGTMLRACGLSA

SEQ ID NO: 93533 - protein, 391 aa, Brucella microti
  misc_feature (1)..(391): tr|C7LGM0|C7LGM0_BRUMC Isochorismate synthase OS=Brucel la microti (strain CCM 4915) OX=568815 GN=entC PE=4 SV= 1
MRTSALKYPTSDADHLIENNTDFSFASGNLKLAASGMREVIATPAIGGSNPDSTFQQAIAQAFERAARAGQRNPIVVGAIPFDPGEPSCLYVPEEMDWQEREPASGASAAAMPQLAGQRSVPDEAGFKHAVEHAIINFRLSDVRKAVLSVMRELTFADDIDVDAMLANLRAQNHDGYQFRVPLPGGGALVGVSPELLIHKDKGKIVSNPLAGSAKRMADPEADRKNADRLAKSEKDHYEHRLVIEDIRARLQPICTELDIPERPSLIHTAALWHLSTRIEGRLHDPDMTALQLACLIHPTPAVCGFPTERARRLIRFVEPFERGLFTGMVGWSDAEGNGEWVVTIRCGTVKGNLVRLFAGAGIVEASSPDSEWAEVQTKLGTMLRACGLSA

SEQ ID NO: 93534 - protein, 391 aa, Brucella neotomae
  misc_feature (1)..(391): tr|A0A381BZZ8|A0A381BZZ8_BRUNE Isochorismate synthase O S=Brucella neotomae OX=29460 GN=entC PE=4 SV=1
MRTSALKYPTSDADHLIENNTDFSFASGNLKLAASGMREVIATPAIGGSNPDSTFQRAIAQAFERAARAGQRNPIVVGAIPFDPGEPSCLYVPEEMDWQEREPASGASAAAMPQLAGQRSVPDEAGFKHAVEHAIINFRLSDVRKAVLSVMRELTFADDIDVDAMLANLRAQNHDGYQFRVPLPGGGALVGVSPELLIHKDKGKIVSNPLAGSAKRMADPEADRKNADRLAKSEKDHYEHRLVIEDIRARLQPICTELDIPERPSLIHTAALWHLSTRIEGRLHDPDMTALQLACLIHPTPAVCGFPTERARRLIRFVEPFERGLFTGMVGWSDAEGNGEWVVTIRCGTVKGNLVRLFAGAGIVEASSPDSEWAEVQTKLGTMLRACGLSA

SEQ ID NO: 93535 - protein, 391 aa, Brucella ovis; identical to SEQ ID NO: 93534
  misc_feature (1)..(391): tr|A0A0H3AVE0|A0A0H3AVE0_BRUO2 Isochorismate synthase O S=Brucella ovis (strain ATCC 25840 / 63/290 / NCTC 1051 2) OX=444178 GN=entC PE=4 SV=1

SEQ ID NO: 93536 - protein, 389 aa, Brucella sp.
  misc_feature (1)..(389): tr|E2PLR6|E2PLR6_9RHIZ Isochorismate synthase OS=Brucel la sp. BO2 OX=693750 GN=BIBO2_0999 PE=4 SV=1
MSALKYPTSDADHLIENNTDFSFASGNLKLAASGMREVIVTPAIGGSDPDSTFQRAIAQAFERAARAGQRNPTVVGAIPFDPGEPSCLYVPEEMEWQEREPASGASTSAMPQLAGQRSVPDEAGFKHAVEHAIINFRLSDVRKAVLSVMRELTFADDIDVDAMLANLRAQNHDGYQFRVPLPGGGALVGVSPELLIHKEKGKIVSNPLAGSAKRMADPEADRKNADRLAKSEKDHYEHRLVIEDIRARLQPICTELDIPERPSLIHTAALWHLSTRIEGRLHDPDMTALQLACLIHPTPAVCGFPTERARRLIRFVEPFERGLFTGMVGWSDAEGNGEWVVTIRCGTVKGNLVRLFAGAGIVEASSPDSEWAEVQTKLGTMLRACGLSA

SEQ ID NO: 93537 - protein, 391 aa, Brucella suis
  misc_feature (1)..(391): tr|A0A4Z0EY12|A0A4Z0EY12_BRUSS Isochorismate synthase O S=Brucella suis OX=29461 GN=E4658_14335 PE=4 SV=1
MRTSALKYPTSDADHLIKNNTDFSFASGNLKLAASGMREVIATPAIGGSNPDSTFQRAIAQAFERAARAGQRNPIVVGAIPFDPGEPSCLYVPEEMDWQEREPASGASAAAMPQLAGQRSVPDEAGFKHAVEHAIINFRLSDVRKAVLSVMRELTFADDIDVDAMLANLRAQNHDGYQFRVPLPGGGALVGVSPELLIHKDKGKIVSNPLAGSAKRMADPEADRKNADRLAKSEKDHYEHRLVIEDIRARLQPICTELDIPERPSLIHTAALWHLSTRIEGRLHDPDMTALQLACLIHPTPAVCGFPTERARRLIRFVEPFERGLFTGMVGWSDAEGNGEWVVTIRCGTVKGNLVRLFAGAGIVEASSPDSEWAEVQTKLGTMLRACGLSA

SEQ ID NO: 93538 - protein, 90 aa, Budvicia aquatica
  misc_feature (1)..(90): tr|A0A484ZVM9|A0A484ZVM9_9GAMM Menaquinone-specific iso chorismate synthase OS=Budvicia aquatica OX=82979 GN=me nF_1 PE=4 SV=1
MMRMDDSRAFLGSSPECLFLRIGNQLKTEALAGTVSGSPDNQKAKELGDWLMQDKKNQHENLLVVDDICQRLQGGTLAIDVLPAEIVRAA

SEQ ID NO: 93539 - protein, 394 aa, Burkholderia ambifaria
  misc_feature (1)..(394): tr|A0A2S9N6U4|A0A2S9N6U4_9BURK Isochorismate synthase O S=Burkholderia ambifaria OX=152480 GN=C6Q14_31680 PE=4 SV=1
MNAISRPDELLVPHSVWDVYRADTPLFLATPAHTLLVCDVAEAIPHANAPLAARVNDALQRARADGHAGAAVVGAVPFDVDAPAVLRVARTMLRARPLGAQRAAVRAGTRYATREVPAADAYADAVAQAVARIRAGELDKVVLARTLEATGDAPVDVAALVARLASCNPHGYTFSVDLGAGRTLLGASPELLVNRFGSVVRANPLAGSAPRSRDPVEDQRRAQALLASAKDLDEHRVVVEAVRDNLAPLCRRLDVPARPSLVQTETMWHLSTEVCGETDADALTLALALHPTPAVCGAPRAAARDCIRDAEPFDRGFYAGMLGWVDARGDGEWVVTIRCAEAFDRTLRLYAGAGVVGESTPDGERAETAAKFRTMLDALGIDRDAATGAAREFA

SEQ ID NO: 93540 - protein, 477 aa, Burkholderia anthina
  misc_feature (1)..(477): tr|A0A3P0C0W6|A0A3P0C0W6_9BURK Isochorismate synthase O S=Burkholderia anthina OX=179879 GN=DF034_25920 PE=4 SV =1
MTAGLPLLHDTFARAARRAAATGTPTLASVSVPLRALDFFDLIAAWDDGVTPWCFHEAGDASVTLFGWDCALELSAAGDTRFAQIDARWRTLVRDAVTAGPQPPRLVGGFRFDSRGPRSAHWSPFADASMTLAKLLIVREGDAHWAVCQQVVSAHDDPAALAHACLARIDSLGALAPAAEDEAPQLLHTQALQASEWQHEVRRAVDAIHDGAFGKVVLARDVLEQYARPVAIAPLLRRLRRRDPHAHLFAVRRAGACFVGATPERLARVAAGDVRTHALAGTIRRGATPDADRALGAALMACAKERLEHALVVDAIRAALAPLSRTLDVPDRPSLHRLPKLQHLSTPIRATLNADATLLQVVAALHPTPAVAGHPRAAALDHIRAHEGFDRGWYAAPLGWIDAHGNGDFIVALRSALVAGGACRLFAGCGIVADSEPTNEYQETELKLSGMRAAIRVRDTAATVRGRTPASASSTVD

SEQ ID NO: 93541 - protein, 477 aa, Burkholderia cenocepacia
  misc_feature (1)..(477): tr|A0A109DZP9|A0A109DZP9_9BURK Isochorismate synthase O S=Burkholderia cenocepacia OX=95486 GN=AS149_15505 PE=4 SV=1
MNAGLPLLHDTFARAARRAAATGTATLASVSVPLRPLDFFDLIAAWDDGVTPWCFHEAGDASVTLFGWDCAVELRATGDTRFAQIDARWRTLVRDAVTAGPQPPRLVGGFRFDSQGPRSAHWAPFPDASMTLARLLIVREGDAYWAVCQQVVAAHDDPAALAHACLARIESLGALAEAAEDDPPQLLHTQALRASEWQHEVRRAVDAIRDGAFGKVVLARDVLERYARPVAIAPLLRRLRRRDAHAHLFAVRRDGACFVGATPERLARVAAGDVRTHALAGTIRRGATPDDDRALGAALMASAKERLEHALVVDAIRAALAPLARTLDVPDQPSLHRLPKLQHLSTPIRAALNADASLLQVVAALHPTPAVAGHPRAPALDHIRAHEGFDRGWYAAPIGWIDAHGNGDFIVALRSALVAGGACRLFAGCGIVAESEPGNEYQETELKLSGMQAAIRVRDAAAQTRGRTQMSASSMVD

SEQ ID NO: 93542 - protein, 477 aa, Burkholderia cepacia
  misc_feature (1)..(477): tr|A0A095EB88|A0A095EB88_BURCE Isochorismate synthase f amily protein OS=Burkholderia cepacia OX=292 GN=DM42_57 59 PE=4 SV=1
MNAGLPLLHDTFARAARRAAATGTPTLASVSVPLRPLDFFDLIAAWDDGATPWCFHEAGDASVTLYGWDCAAELSATGDTRFAQIDARWRALVRDAVTAGPQPPRLVGGFRFDAQGPRSAHWASFPDASMTLAKLLIVREGDAHWAVCQQVVAAHDDPAALAHACLARIESLGTLAPAAEDDAPQLLHTQALQASEWQHEVRRAVDAIHDGAFGKVVLARDVLEQYARPVAIAPLLRRLRRRDAHAHLFAVRRDGACFVGATPERLARVAAGDVRTHALAGTIRRGATPDDDRALGAALMASAKERLEHALVVDAIRAALAPLSRELDVPDQPSLHRLPKLQHLSTPIRATLNAEATLLQVVAALHPTPAVAGHPRAPALDHIRAHEGFDRGWYAAPIGWIDAHGNGDFIVALRSALIAGGACRLFAGCGIVADSEPVNEYQETELKLSGMRAAIRVREAAAERPGRTQASASSMVD

SEQ ID NO: 93543 - protein, 479 aa, Burkholderia contaminans
  misc_feature (1)..(479): tr|A0A2S5E680|A0A2S5E680_9BURK Isochorismate synthase O S=Burkholderia contaminans OX=488447 GN=C3743_10505 PE= 4 SV=1
MNAGLPLLHDTFARAARRAADTGTPTLASVSVPLRPLDFFDLIAAWDDGATPWCFHEAGDASVTLFGWDGVLELTATGDTRFAQIDARWRTLVRDAVMAGPQPPRLVGGFRFDSHGPRSTHWAPFPDASMTVAKLLIVREGDAHWAVCQHIVAAHDDPAALAHACLARIESLGTLAAAHDDDAPHLLHTQALQASEWQHEVRRAVDAIHGGAFGKVVLARDVLEQYARPVAIAPLLRRLRKRDAHAHLFAVRRDGACFVGATPERLARVAAGDVRTHALAGTIRRGATPDDDRALGAALMDSAKERLEHALVVDAIRAALAPLSRTLDVPEQPSLHRLPRLQHLSTPIRATLKADATLLQVVAALHPTPAVAGHPRAEALDHIRAHEGFDRGWYAAPVGWIDAHGNGDFIVALRSALVDGGACRLFAGCGIVADSEPANEYQETELKLSGMQAAIRMRDAAADADARGPATMSASSTVE

SEQ ID NO: 93544 - protein, 394 aa, Burkholderia lata
  misc_feature (1)..(394): tr|A0A3G3HBH3|A0A3G3HBH3_BURL3 Isochorismate synthase O S=Burkholderia lata (strain ATCC 17760 / DSM 23089 / LM G 22485 / NCIMB 9086 / R18194 / 383) OX=482957 GN=CVS37 _11210 PE=4 SV=1
MNAISRPSDLLAPQNIWDLYRADAALFLATPAHTLLAADPAEAIPHADTPLAERVARALRHAQAQGHAGAAVVGAVPFDADAPAALRVAHTMLRAAPRGAPRAPELTGMRYATREVPAADAYADAVAHAVARIRAGELDKVVLARTLEVVGEQPVEVAPLVARLAARNPHGYTFSVDLGEGRTLLGASPELLVNRFGGIVRANPLAGSAPRSRDPIEDRRRAEALLDSVKDLDEHRVVVEAVRDSLAPYCRHLDVPARPSLMHTETMWHLSTEVRGETDADALTLALALHPTPAVCGAPRDAARACIRAAEPFDRGFYAGMLGWVDARGDGEWIVTIRCAQAFDRTLRLYAGAGVVAESTPDGERAETAAKFRTMLDALGIRHDAASGGAREAA

SEQ ID NO: 93545 - protein, 394 aa, Burkholderia multivorans
  misc_feature (1)..(394): tr|A0A2S9M2T4|A0A2S9M2T4_9BURK Isochorismate synthase O S=Burkholderia multivorans OX=87883 GN=C6Q15_33710 PE=4 SV=1
MNAIPRLSELLASHNVWELYRTDTPLFLATPAHTLLAIDVADAIPHTDAPLAARVNDALRRARAEGQAGAAVVGAVPFDVDAPAALRVARTLLRARPLDAPQVPEPVGTRYATYELPSADVYADAVARAVASIRAGELDKVVLARTLEVTGERPVDVATLVARLASRNPRGYTFSVDLGAGRTLLGASPELLVNRFGGIVRANPLAGSAPRSRDPVEDERRARALLASAKDLAEHRVVVDVVRQGLAPLCRRLEVPERPSLIQTETMWHLSTEVRGETDADALTLALALHPTPAVCGAPRAAARDIIGDAEPFDRGFYAGMLGWVDTHGDGEWVVTIRCAEAFDRTLRLYAGAGVVGESTPEGERAETAAKFRTMLDALGIDRVAASDAAREAA

SEQ ID NO: 93546 - protein, 475 aa, Burkholderia oklahomensis
  misc_feature (1)..(475): tr|A0A381IDW7|A0A381IDW7_9BURK Isochorismate synthase d hbC OS=Burkholderia oklahomensis OX=342113 GN=dhbC PE=4 SV=1
MSARLSVLRDTFARAARQAAETGEPVLASASFPLRPLNLFDLIASWDDAITPWFFHETGDPSVALFGWDRAFELSATGDARFAQLDARWRALGRTAVIAGPQPPRIGGGFRFDPHGPRQAHWQSFADASMMLAKVMIVREGDAYWAVCQHVVAAHDDPAALARERIARLDMLATLAPAPDDDAPHLLRTQALQAGEWQGKVRRAVAAIRRDELSKVVLARDVQQQYAQPVAIGALLRRLRRRDAHAHLFAIRNGDGCFVGATPERLARVADGKAQTHALAGTIRRGADPDSDRALGAELMASAKERLEHALVVDAIRGALAPLSRTIDVPAQPSLQRLPRLQHLSTPIGATLNADATLLQVVAALHPTPAVAGHPRAIALEHIRAHEGFDRGWYAGPIGWIDAHGNGDFVVALRSALIAGRACRLFAGCGIVADSEPEREYQETNLKLSGMQAAIELCDIADNLRKVASIPSASR

SEQ ID NO: 93547 - protein, 489 aa, Burkholderia plantarii
  misc_feature (1)..(489): tr|A0A0B6RMM2|A0A0B6RMM2_9BURK Salicylate biosynthesis isochorismate synthase PchA OS=Burkholderia plantarii O X=41899 GN=pchA PE=4 SV=1
MSTSATTPSETLAKALGVPLADAFTDVLAGAFTRAARQAAASGAPVLASVSFPLKPLDLPALIGRWDDGVTPWAFHETVTPSFALFGWDCALELSGHGDARFAQIDARWRELVRTGIVCGDQPPRLVGGFRFDPAAARQAHWQAFADASMMLPRLSVVRERGDHWLVCQHVAAPDDDGAAVARRYEAWIGRLDNAMPVSAPASGRGASGALDTATLDAGVWKRKVRDATDAIRHGAFSKVVLARDVPRRYPAPVAIAPLLARLRRRDANAQLFAARRGDGCFVGATPERLVRVHERLVHTQALAGTTRRDADPDRDRTLGAELMADRKERLEHAIVVEAIVAALAPHTHDLQLPDRPVLQLLPRLQHLSTPIRATLDAGATPLALVAALHPTPAVAGHPRAAALAWLRMVEGFDRGWYAGPFGWIDAHGNGDFCVALRCALIVANTCRLFAGCGIVAESDPEREYQETALKLSGMQAAIESPEDSPTPG

SEQ ID NO: 93548 - protein, 484 aa, Burkholderia pseudomallei
  misc_feature (1)..(484): tr|A0A0E1S129|A0A0E1S129_BURPE Salicylate biosynthesis isochorismate synthase (Isochorismate mutase) OS=Burkho lderia pseudomallei 305 OX=425067 GN=pchA PE=4 SV=1
MSARLSALLDTFARAARRAADTGEPVLAAASFPLRPLNLFDLIASWDDGATPWCFVEAGDEPGAMRAPGKPPALFGWDCALDLNEAGDARFARLDARWRALVRAAVVTGAQPPRIVGGFRFDPLGPRYAHWHAFADASMTLAKLLVVREGEAYWAVCQRVVAAHDDPAALARECDARIGMLASLAPAADDEAPRLLRVQALQAAAWQHEVRRAVDAIRGEAFSKVVLARDVLQQYARPVAIGPLLRRLRRRDPRAHLFAIRRRDGCFVGATPERLARVAHGRAHTHALAGTIARGNDPAHDRALGAQLMASAKERLEHALVVDAIRDALAPLSRAIDVPAQPSLLRLPRLQHLSTPIAAALNERATLLQVVAALHPTPAVAGHPRAAALEHIRAHEGFDRGWYAGPIGWIDAHGNGDFVVALRSALISAGACRLFAGCGIVAESEPAREYRETGLKLSGMQAAIEARDAAAAARTVEPIPSAAH

SEQ ID NO: 93549 - protein, 394 aa, Burkholderia pyrrocinia
  misc_feature (1)..(394): tr|A0A4R4FVC8|A0A4R4FVC8_BURPY Isochorismate synthase O S=Burkholderia pyrrocinia OX=60550 GN=EVG18_19825 PE=4 SV=1
MNAISRPDELLVPHNVWDVYRADAPLFLATPAHTLLACDVAAAIPHADAPLAARVNDALLRERADGHMGAAVVGAVPFDVGAPAALRVARTMLRARPLGALRAAGPAGTRYATREVPSADAYADAVAQAVARIRAGELDKVVLARTLEATGDAPVDVAALVTRLASCNPHGYTFSVDLGGGRTLLGASPELLVNRFGGIVRANPLAGSAPRSRDPVEDRRRAQALLASAKDLDEHRVVVEAVRDSLAPLCRRLDVPARPSLVHTETMWHLSTEVCGETDADVLTLALALHPTPAVCGAPRTAARDCIRDAEPFDRGFYAGMLGWVDVHGDGEWVVTIRCAEAFDRTLRLYAGAGVVAESTPDGERAETAAKFRTMLDALDIDRDAASGAAREAA

SEQ ID NO: 93550 - protein, 483 aa, Burkholderia reimsis
  misc_feature (1)..(483): tr|A0A365QYQ0|A0A365QYQ0_9BURK Isochorismate synthase O S=Burkholderia reimsis OX=2234132 GN=DPV79_10475 PE=4 S V=1
MNAGLPLLHDTFARAARRAADTGTPTLASVSVPVRPLDFFDLIAAWDDGATPWFFHEAGDTSVTLFGWGNALELTATGDTRFAQIDARWRTLVRDAVTAGPQPPRAVGGFRFDPRGARSAHWAPFPDASMTVATLLIVREGDAHWAVCQHVVAAHDDPAALAHACLARIESLGSLAAARDDAAPHLLHTQALQASEWQHEVRRAVDAIHGGAFGKVVLARDVLEQYARPVAIAPLLRRLRKRDAHAHLFAIRREGACFVGATPERLARVAAGDVRTHALAGTTRRGATPDDDRALGAALMASAKERLEHALVVDAIRAALTPLSRALDVPAEPSLHRLPRLQHLSTPIRATLKEDATLLQVIAALHPTPAVAGHPRDAALDHIRAHEGFDRGWYAAPVGWIDAHGNGDFIVALRSALVDGGACRLFAGCGIVADSEPVNEYQETELKLSGMQAAIRVRDVEAGVEAASDAHDPARVSASSTVE

SEQ ID NO: 93551 - protein, 395 aa, Burkholderia singularis
  misc_feature (1)..(395): tr|A0A238HC22|A0A238HC22_9BURK Isochorismate synthase o f siderophore biosynthesis OS=Burkholderia singularis O X=1503053 GN=BSIN_2634 PE=4 SV=1
MSTLSNPEFYSDIQNIADAYRTATPFLFATPRYTLIAQDIVEAVPHSGEPLGARVRRALSHAREQGRGGAAVVGAVPFDVERPAALRVVGSMSRGNPLTGVRASLPAHDRYVTRAVPPGAEYASAVAQAVADIRAGRLDKVVLARTLELTGEHPVDVGALVERLAACNPHGYTFSVDLGDARTLVGASPELLVSRFGGVLRANPLAGSAPRSNDPVEDRRRADALLESTKDLDEHRVVVDAVKESLAPFCKQLAVPARPSLVHTRTMWHLSTEVVGETDADALTLALALHPTPAVCGYPRSGAREAILRAEPFDRSFYTGMLGWVDTRGDGEWVVTLRCAETHGETLRLFAGAGIVGDSSPDAELAETAAKFRTMLDAIGVDRAVAIDSTMEVPA

SEQ ID NO: 93552 - protein, 475 aa, Burkholderia sp.
  misc_feature (1)..(475): tr|A0A3N8BDV7|A0A3N8BDV7_9BURK Isochorismate synthase O S=Burkholderia sp. Bp9126 OX=2184570 GN=DIE19_30065 PE= 4 SV=1
MSARLPLLVDAFTQAARRAAATGEPVLAAVSFPLPPLDLFDLVAHWDDGVTPWTFHETGEPSVALFGWDCAHALRATGDTRFAALDARWHALVRAAVCAGPQPARAIGGFRFDPHAPRQPHWASFGDASLTLAKLLIVREGDAYWAVCQHVVAAHDDPVALARERDTRLAQLASLPAAPDDDAPRMLYTQALPAAEWQRRARRAVDAIRRGTLSKVVLARDVLLQVAQPVRIGPLLKRLRRRDPHAHLFAIREPGGCFVGATPERLARVADGRVQTHALAGTTPRGDDPASDRALGDALLACAKERHEHALVVDAIRDALAPLSAALDVPAQPMLHRLPRLQHLSTPIGGPLDAGVTPLRVVAALHPTPAVAGHPRADALAHIRAHEGFDRGWYAGPIGWIDSRGNGDFVVALRSALISEGACRLFAGCGLVADSEPEREYQETSLKLTSMQAAILQRERADALCTVAPLRVRAT

SEQ ID NO: 93553 - protein, 394 aa, Burkholderia stabilis
  misc_feature (1)..(394): tr|A0A4Q2AM42|A0A4Q2AM42_9BURK Isochorismate synthase O S=Burkholderia stabilis OX=95485 GN=D1006_00130 PE=4 SV =1
MNAISRPDQLLVPHNVWDVYRADTPLFLATPAHTVLACDVAEAIPHADAPLAARVNDALRRARADGHVGATVVGAVPFDVGAPTALRVARTMLRARPLGARRAAGPAGTRYATREVPSADAYADAVAQAVARIRAGELDKVVLARTLEATGEVPVDVAALVARLASCNPHGYTFSVDLGAGRTLLGASPELLVNRFGGVVRANPLAGSAPRSRDPVEDRRRAQALLASAKDLDEHRVVVEAVRDSLAPLCRRLDVPARPSLVHTETMWHLSTEVCGETDADALTLALALHPTPAVCGAPRAAARDCIRDAEPFDRGFYAGMLGWVDAHGDGEWVVTIRCAEAFDRTLRLYAGAGVVGESTPEGERAETAAKFRTMLDALGIDRDAASGAAREAA

SEQ ID NO: 93554 - protein, 394 aa, Burkholderia stagnalis
  misc_feature (1)..(394): tr|A0A3P0GFF6|A0A3P0GFF6_9BURK Isochorismate synthase O S=Burkholderia stagnalis OX=1503054 GN=DF145_07140 PE=4 SV=1
MNMVSRPSTLLAPRNVWELYRPDTPLFLATPDHALLAADAAQAVPHGDAPLAARVAQALRDARASGYADAAVVGAVPFDVDAPAALRVARTLLRAGPLGSPHAPDPASTRYATRAVPSADRYADAVAQAVARIRAGELDKVVLARTLEITGERPVDVAPLVARLAARNPHGYTFSVDLGAGRTLLGASPELLVNRFGGIVRANPLAGSAPRSPDPVEDRRRADALLASVKDLDEHRVVVEAVRDSLAPLCRRLDVPARPSLIHTETMWHLSTEVRGETDADALTLALALHPTPAVCGAPRAAARACIRDAEPFDRGFYAGMLGWVDTHGDGEWVVTIRCAEARDRTLRLYAGAGVVGESTPDGERAETAAKFRTMLDALGVSRDVAADALTERA

SEQ ID NO: 93555 - protein, 481 aa, Burkholderia thailandensis
  misc_feature (1)..(481): tr|Q2T472|Q2T472_BURTA Isochorismate synthase family pr otein, putative OS=Burkholderia thailandensis (strain A TCC 700388 / DSM 13276 / CIP 106301 / E264) OX=271848 G N=BTH_II1833 PE=4 SV=1
MNARFSVLLDTFARAARRAADTGEPVLAAASFPLRPLKLFDLIASWDDGATPWCFVEAGDEPGAPDRPAALFGWDCALDLNEPGDARFARLDARWRALARAAVVAGPQPPRIVGGFRFDPRGPRHAHWQAFPDASLTLAKMLIVREGDAYWAVCQRVVSAHDDCAALARECDARIGMLAALAPAIDDDAPRLLHVHALQAAEWQHKARRAVDAIRRDAFSKVVLARDVLQQYAQPVAIGPLLRRLRLRDARAHLFAVRRREGCFVGATPERLVRVAHGHAQTHALAGTIARGDDRDHDRALGAQLMASAKERLEHALVVDAIRDALAPLSRTIDVPAEPSLLRLPRLQHLSTPIAATLNADATLLQAVAALHPTPAVAGYPRAAALEHIRAHEGFDRGWYAGPIGWIDAHGNGDFVVALRSALISAGACRLFAGCGIVAESEPAREYRETNLKLSGMRAAIEARDAAANLRTVAPMPAAAH

SEQ ID NO: 93556 - protein, 390 aa, Burkholderia ubonensis
  misc_feature (1)..(390): tr|A0A3N7QA92|A0A3N7QA92_9BURK Isochorismate synthase O S=Burkholderia ubonensis OX=101571 GN=DF011_07900 PE=4 SV=1
MNMVSRPATLLAPRNIWEVYRPDTPLFLATPAHALLATDAADTVPHADTPLASRVADALRDACANGHAGAAVVGAVPFDVEAPAALRVARTLLRAGPLGSLRSPALTATRHATRAVPSADVYGNAVAQAAARIRAGELAKVVLARTLEITGERPVDVAPLVARLAARNPHGYTFSVDLGAGRTLLGASPELLVSRFGGIVRANPLAGSAPRSPDPVEDRRRADALLASVKDRDEHRVVVDAVRDALAPLCRRLDVPVRPSLIHTETMWHLSTEVRGETDADALTLALALHPTPAVCGAPRAAARACIRDAEPFDRGFYAGMLGWVDTQGDGEWVVTIRCAEAHDRTLRLYAGAGVVGESTPEGECAETAAKFRTMLDALGVSHDVAPEAA

SEQ ID NO: 93557 - protein, 394 aa, Burkholderiaceae bacterium
  misc_feature (1)..(394): tr|A0A5C7PA98|A0A5C7PA98_9BURK Isochorismate synthase ( Fragment) OS=Burkholderiaceae bacterium OX=2030806 GN=E 6Q92_05560 PE=4 SV=1
PLSLLATVERDTPLFLATPHHWLASEPGAALQPLQARSAELPSRALEALAAARHAGQPEAAIVGALPFDPDLPAQLHLTPRLLRARAVPVQAPTSPAWTQEVQALPSGARYAQAVGEAVARMRRGALEKVVLARTLLLRGPALPGVQDLLTRLLARHPQALTFSARTGPGRCLVGASPELLVRRTKGWLQANPLAGSLPRVADPEEDERRGRLLLASPKDLHEHALVVDAVVQALRPHCADLRVPAGPSLVKTPSMWHLSTEIQGPTEADALTLALALHPTPAVCGHPRAQALSLIRELEPFERGCYAGAVGWMDGQGDGEWAVAIRCAELGPGSLQLFAGAGIVAASDPLLEQAETGAKFRTMLDALGLGHDVTEVAPDLRAAMNGPEQGRAA

SEQ ID NO: 93558 - protein, 433 aa, Buttiauxella agrestis
  misc_feature (1)..(433): tr|A0A381CAF5|A0A381CAF5_9ENTR Isochorismate synthase M enF OS=Buttiauxella agrestis OX=82977 GN=menF PE=3 SV=1
MNSVVVALQQLQLALNAEFADAPGLEQLSVAISLSDASDALAWLTSQRLYPQFYWQQRSGDDEIAALGALRNFETLDTASAFLNDYADQPTLRITGVNAFSPTTSCLFLPRLEWRRMGGSAYLYLHLYSETSLQDDAREARHFLEQLLPAKLLPSQRLNCVGEQHIPTQPEWHQLIERATTAIEQHELDKVVLARVTDLQFTAAVSAAGFMAASRRVNLNCYHFLMVFDASHAFLGSSPERLWRRIDCALRTEALAGTVSNHPDEHRAWSLGQWLLKDDKNQRENMLVVEDICQRLQKSVGAIDVLPPQIVRLRKVQHLRRCIWTELAKPDDAQCLALLQPTAAVAGLPRDVAHQFITQYEPFEREWYAGSAGYISQRQAEFCVALRSAKVTNNMVRLYAGAGIVAGSDAAEEWQEIENKAAGLRTLLTKTTF

SEQ ID NO: 93559 - protein, 393 aa, Buttiauxella brennerae
  misc_feature (1)..(393): tr|A0A1B7IVN3|A0A1B7IVN3_9ENTR Isochorismate synthase O S=Buttiauxella brennerae ATCC 51605 OX=1354251 GN=M975_ 0510 PE=4 SV=1
MDTLLARQPQEKQLTSCADSFFFMSPYRSFSTSGCFIRLDCPAFDGENLNGGLQKQLREVFENAKKHGIEKPIAVGAIPFDPRQPSALFIPERWQTFSRAQRQSDSSQCGAAQPLNIAARKAVPEQDKFMEMVAHAAAATTQPDIDKVVLSRLIDIETDAPVDLDALLNRLISQNPTSYNFHVPLADGSSLVGASPELLLRKSGKNFSSLPLAGSARRDKDNIQRDSEIGAQLLRSTKDRHEHGLVTQAMRDVLQPHSQYLTLSDTPELITTPTLWHLATPIYGQVKDSHDNALSLACLLHPTPALSGFPHDVAQKLIAELEPFDRELFGGIVGWCDAEGNGEWVVTIRCARVGGNQVRLFAGAGIVPASSPESEWRETGVKLSTMLNVFGLN

SEQ ID NO: 93560 - protein, 393 aa, Buttiauxella gaviniae
  misc_feature (1)..(393): tr|A0A1B7HRM0|A0A1B7HRM0_9ENTR Isochorismate synthase O S=Buttiauxella gaviniae ATCC 51604 OX=1354253 GN=M977_0 3211 PE=4 SV=1
MDTLLARQPQEKQLTSCADSFFFMSPYRSFSTSGCFTRLDCPALDGENLNAGLQKQLREAFKNAKKHGIEKPVAVGAIPFDPRQPSALFIPESWQTFSRAQRQIDSSQCGAAQPLNIAARKAVPEQDKFMEMVAHAAAATALPDIDKVVLSRLIDIETDAPVDLDALLNRLISQNPTSYNFHVPLADGSSLVGASPELLLRKSGKNFSSLPLAGSARRDTNNIQRDSEIGAQLLRSSKDRHEHGLVTQAMRDVLQPHSQHLTLSDTPELITTPTLWHLATPIYGQVEDHQHNALSLACLLHPTPALSGFPHDVAQKLIAELEPFDRELFGGIVGWCDAEGNGEWVVTIRCARVGGNQVRLFAGAGIVPASSPESEWRETGVKLSTMLNVFGLN

SEQ ID NO: 93561 - protein, 433 aa, Buttiauxella izardii
  misc_feature (1)..(433): tr|A0A3A5JNL3|A0A3A5JNL3_9ENTR Isochorismate synthase M enF OS=Buttiauxella izardii OX=82991 GN=menF PE=3 SV=1
MNSVVVALQQLQLALNAEFADAPGLEQLSIAISLSDASDALAWLTSQRLYPQFYWQQRNGDDEIAALGALQKFETLEAASAFLNDYASQPTLRITGVNAFSPTTSFLFLPRLEWRRTGGGAFLYLHLYSETSLQEDAREARQFLEQLLPAKLLPSQRLNCVGEQHIPTQPEWHQLIERATTAIEQHELDKVVLARITDLQFTSAVSAAGFMAASRRVNLNCYHFLMVFDASHAFLGSSPERLWRRIDNALRTEALAGTVANHPDEHRAWSLGQWLLKDDKNQRENMLVVEDICQRLQKAVGAIDVLPPQIVRLRKVQHLRRCIWTELARPDDVECLTLLQPTAAVAGLPRDRARQFITQYEPFEREWYAGSAGYLSQRQAEFCVALRSAKVTNNMVRLYAGAGIVAGSDAAEEWQEIENKAAGLRTLLTKTTF

SEQ ID NO: 93562 - protein, 433 aa, Buttiauxella noackiae
  misc_feature (1)..(433): tr|A0A1B7HZY2|A0A1B7HZY2_9ENTR Isochorismate synthase M enF OS=Buttiauxella noackiae ATCC 51607 OX=1354255 GN=m enF PE=3 SV=1
MNSVVVALQQLQLALNAEFADAPGLQQLSCAVTLSDASDALAWLTSQRLYPQFYWQQRNGDDEIAALGAVRQFDTLDAARVFIDDYADQPAVRITGVNAFSPTSSFLFLPRLEWRRIGGDAFLFLNIYSETSLQNDARAALQFLEQILPAKQLPLQRLNCVGEQHIPTQPEWNHLVDLATTAIEQHKLDKVVLARATDLQFTTAVSAAGFMAASRRVNLNCYHFLMVFDGSHAFLGSSPERLWRRIDTALRTEALAGTVANHPDDHRAWSLGQWLLKDDKNQRENMLVVEDICQRLQKTVGAIDVLPPQVVRLRKVQHLRRCIWTDLAQPDDAVCLAMLQPTAAVAGLPRDVARGFIANNEPFEREWYAGSAGYISQRQSEFCVALRSAKVINNMVRLYAGAGIVAGSDAAEEWQEIENKAAGLRTLLTTSTF

SEQ ID NO: 93563 - protein, 433 aa, Buttiauxella sp.
  misc_feature (1)..(433): tr|A0A4R6E2J2|A0A4R6E2J2_9ENTR Isochorismate synthase M enF OS=Buttiauxella sp. JUb87 OX=2485129 GN=menF PE=3 S V=1
MNSVVVALQQLQLALNAEFADAPGLQQISFAVTLSDASDALAWLTTQRLYPQFYWQQRNGDDEIAALGLVHQFNTLEAAREFLDDYAGQPAIRIAGVNAFDPATSFLFLPRLEWRRTGGDAQLHLHLYSETSLKEDARAAQAFLEQLLPAKQLPLQHLNCVGEQHIPPQSEWLKLIDLATSAIEQHELDKVVLARATDLQFTTAVSAAGFMAASRRVNLNCYHFLMVFDASNAFLGSSPERLWRRIDTALRTEALAGTVANHPDDHRAWSLGQWLLKDDKNQRENMLVVEDICQRLHKTVGTIDVLPPQIVRLRKVQHLRRCIWTVLAQPDDAACLTMLQPTAAVAGLPRDVARDFIDKNEPFEREWYAGSAGYLSQRQSEFCVALRSAKVTNHIVRLYAGAGIVAGSDAAEEWQEIENKAAGLRTLLTKTMF

SEQ ID NO: 93564 - protein, 433 aa, Buttiauxella warmboldiae
  misc_feature (1)..(433): tr|A0A3N5EF25|A0A3N5EF25_9ENTR Isochorismate synthase M enF OS=Buttiauxella warmboldiae OX=82993 GN=menF PE=3 S V=1
MNSVVVALQQLQLALNAEFADAPGLQQLSCAVTLSDASDALAWLTTQRLYPQFYWQQRNGDDEIAALGALRQFDTLAAARAFIADHADQPALRITGINAFSPDSSCLFLPRLEWRRTGGDAFVYLHLFSETSLQEDARAAQQFLAQLLPAKQLPMQRLNCVGEQHIPTQPEWNQLIERATAAIEQRELEKVVLARATDLQFTCGVSAAAFMASSRRVNLNCYHFLMVFDASHAFLGSSPERLWRRIDSALRTEALAGTVANHPDDHRAWSMGQWLLKDDKNQRENMLVVEDICQRLQKNVGAIEVLPPQVVRLRKVQHLRRCIWSDLAQPDDAACLAMLQPTAAVAGLPRDAARDFIASHEPFEREWYAGSAGYLSQRQAEFCVALRSAKVTNNIVRLYAGAGIVAGSDAALEWQEIENKAAGLRTLLTKTTF

SEQ ID NO: 93565 - protein, 380 aa, Butyricimonas faecalis
  misc_feature (1)..(380): tr|A0A3S9VUU3|A0A3S9VUU3_9BACT Isochorismate synthase O S=Butyricimonas faecalis OX=2093856 GN=D8S85_12785 PE=4 SV=1
MIEQTENRLSVAEAQNICLRNNIPFYTYRLPGSREVIFGAQLSNDTRIFKGFEKHRGEKGFVITPFNHSSWSFPFFIKADLSFTDYLTDGEAIRNLQNTVFNTPERIFTKQDCEHFEYLDELRTMIDTLKREGMKKAVLSRTITIPCDSLRLSPAIFEQMKQYHHAFLFFAAIPGKCAWMGASPETFLKYDRNGFFTMSLAGTQPVATAKNPPEWGDKDIEEQQIVTDYIQDTLRHFFTRHLDIEGPITLQAGNVFHLCTFFRSDEQLPADQIDELVGQLHPTPAVCGLPKKRAMQIISEIEKRDRGYYAGFLGPLQASGAFDLFVNLRTMEVFDDALRLYVGGGITPLSDPETEWQETCQKADTLLNLIRQMNYGKITF

SEQ ID NO: 93566 - protein, 380 aa, Butyricimonas virosa
  misc_feature (1)..(380): tr|A0A412X461|A0A412X461_9BACT Isochorismate synthase O S=Butyricimonas virosa OX=544645 GN=DWW18_03085 PE=4 SV =1
MIEQTENRLSVAEAQNICLRNNIPFYTYRLPGSREVIFGAQLSNDTRIFKGFEKHRGEKGFVITPFNHSSWSFPFFIKADLSFTDYLTDGEAIRNLQNTVFNTPERIFTKQDCEHFEYLDELRTMIDTLKREGMKKAVLSRTITIPCDSLRLSPAIFEQMKQYHHAFLFFAAIPGKCAWMGASPETFLKYDRNGFFTMALAGTQPVATAKNPPEWGDKDIEEQQIVTDYIQDTLRHFFTRHLEIEGPITLQAGNVFHLCTFFRSDEQLPADQIDELVGQLHPTPAVCGLPKKRAMQIITEIEKRDRGYYAGFLGPLQASGAFDLFVNLRTMEVFDDALRLYVGGGITPLSDPETEWQETCQKADTLLNLIRQMNYGKITF

SEQ ID NO: 93567 - protein, 467 aa, Caldalkalibacillus thermarum
  misc_feature (1)..(467): tr|F5L4C4|F5L4C4_CALTT Isochorismate synthase MenF OS=C aldalkalibacillus thermarum (strain TA2.A1) OX=986075 G N=menF PE=3 SV=1
MIRQQLDILDDFVQGMQQALKSCRPGLVSLVTRIQPLDPLSFYAAAGQWFHGQRLYWSTPDHEFTLVGLGTAVKIESDQDTRFDDVTKEWKHLIANTHIHTEGEVMGTGPLLLGGFSFDPQKPSSSLWQNYKAASFILPQFLLTQSKNQSYLTINAYIHPEDDLPEKIDQLNRLKERLITRCMDFSFAQEVHPITLNVFEPAREEWLSSVKQVIAEIQQGVLQKVVLARRVEVESETPFRPEQILNYLRQVQTSSYVFSIEWGENAFVGATPERLIKKEGSRVLSTCLAGSIKRGQTLEEDLALSKALLQDPKNRVEHEIVVRMIKQALGDLCTRVEAPDQPIIYKTKQIQHLYTPVRGLAKDNISLLKMVEALHPTPALGGYPREEAVRRIRELEGMDRGWYAAPIGWLDRQGNGEFVVAIRSALIRHRQATLFAGCGIVEDSDPQSEYEETQMKLKPMLSALGGH

SEQ ID NO: 93568 - protein, 446 aa, Caldibacillus debilis
  misc_feature (1)..(446): tr|A0A150MD13|A0A150MD13_9BACI Isochorismate synthase O S=Caldibacillus debilis OX=301148 GN=B4135_1408 PE=4 SV =1
MKNIDPLKFFLENRRFFPGRNFFWKEKDSDFFMAGFGAAKIIRFREKKDRFLELKRYWEDICEKLIINNPYGPVRGTGPLLFGGFSFRPLKDGALWGNFLDGFFYLPRYLLTKADGETYLTVNGGEEEAVPEWVNRFSEEAEGSGLAEMFPDESCFGAGAYPAKGTELQPERWKEHVGKAISLLKEGYGEKVVLAREMKVACEGGIDAGMVLANLFRSQTANYLFLLENGGEAFIGASPERLARKDGERIFSECVAGSAPRGKDPQEDERIGRELLSDEKNLQEHRFVVEMITGAMARYCRDLRVPEQPVILNNPDIKHLYTPVAGILREDGAFFDVLRSLHPTPALGGTPRDVALELIGRLELFERGLYGAPIGWVDHRMDGEFAVGIRSALIRGNEARLFAGCGIVKDSEAEKEFAETRVKFRPMLRALCGKTWDDGGMFDERE

SEQ ID NO: 93569 - protein, 463 aa, Caldilineae bacterium
  misc_feature (1)..(463): tr|A0A3M1FBG4|A0A3M1FBG4_9CHLR Isochorismate synthase O S=Caldilineae bacterium OX=2420332 GN=D6790_16465 PE=4 SV=1
MTSLLFDEYQPGLHGRLCSLAMPAPGLTAASFLRQGRGQERFFFRDVRTAATFAGVGVAAHLMGYGETRFASIRRQAQALFRHAVNVGEAEPLAGPRLFGGFAFRDDFTPDITWTAFHPAHFILPHYQLLERNGDVWLTINTLLPLEESPQDNRPMLQEALETRYEQLLRASGNPTENRGEASQDAPQIDYPLPFSAWAQMIHAAQEAFRRTRLQKVVLSRICQAAFHQPVDVDAALARLTARYPDCFGFLFEPQPGHAFLGASPELLVQLRGASLETMGLAGSIQRGRTQAEDAVLAQELLASPKNRREHAVVVDSIRRRLQPLTSRLDIPQEPQVLTLSNIQHLYTPIRGELARPQGVLPLVEELHPTPALGGTPRALALAFIRDHEPTLRGWYAAPVGWIDGNLDGTFTVAIRSAVVQGKRAWLYAGAGIVAGSVPALEWEETEWKFRPMKEALGIGEEA

SEQ ID NO: 93570 - protein, 433 aa, Caldithrix sp.
  misc_feature (1)..(433): tr|A0A523HKR0|A0A523HKR0_9BACT Isochorismate synthase O S=Caldithrix sp. OX=1962856 GN=E2O79_02225 PE=4 SV=1
MSSKFKSAFEIEDAARSFDLFYRAAILNRLSIAAWRCPNRQNTNLIIDLSGGADRVDLNLSLLKQGFVFSPFASHEEKSGFFIKANLHLNETTYIFNDFSNGHIDADITCNKLRFESTLKELSRTGFYQEPAKNWYIRNLSNPSVSATKEQEFCNWVAAALEQIRKEKFRKVVLSRTHEVLLKDEFSVLGLFHNLCAEYPNAFVSLVAIPGNGTWVGATPELLLSLDNQELMTVALAGTQPVTSSREIQTSKWGKKEIVEQEIVSEYIRDCFKQQNINDFSEHGPETVQIGNILHLQTKFIWRNSRHNEVDVVNRLLSSLHPTPAVCGVTKKAALEFIEKTESHKREFYAGILGPVNIKNRSRLFANLRCLQLQNHSAILYAGGGITIDSIPKQEWLETELKLNALLKFIQKPNELPLSERVDSARSLEGALG

SEQ ID NO: 93571 - protein, 488 aa, Calditrichaeota bacterium
  misc_feature (1)..(488): tr|A0A3M1XED4|A0A3M1XED4_9BACT Isochorismate synthase M enF OS=Calditrichaeota bacterium OX=2212469 GN=menF PE= 3 SV=1
MSKLNQRAADDPVLTSLATEKRPTSPIPFHQLHRVVGRYLEDREGYFQKLAAGLPAPRLVRLEFPVEPCEPLVWLSGQGAMPRAYWRDRQQRVEIAGAGHCLSVSSTEPADLNALFSQFRRWLATADPGLKFLGGLAFDLSRPSQDLWQPFGSYHFWVPQLECGRRDNQGYFAVNLFLDPGLSSRSPVRVALRLLSSTNGKESLLPAALPGIQQREDLPDLPGWGRAIQNVLDTIEHGNLEKLVLARQSRFVFQKEPDSLSLFHRLARANPDAYQFYFQLEGGSAFLGCSPERLFRRSGRLLFTEAVAGTRPRGHTAREDRELARQLLQSRKDRHEHFLVVKCILQGLERLCEKVESQNEPSVLKLARVQHLASRFEGLLKPGVSDADILATLHPTPAVGGYPTRAALATLRRLEPFHRGWYAGPVGWLGREEAEFAVGIRSGLFHQQEGYLYTGAGIVSGSSVQAEWNEIENKLANFLRIFEGEGDC

SEQ ID NO: 93572 - protein, 474 aa, Calditrichales bacterium
  misc_feature (1)..(474): tr|A0A524LRL9|A0A524LRL9_9BACT Isochorismate synthase M enF OS=Calditrichales bacterium OX=2528038 GN=menF PE=3 SV=1
MNISISATTITRDRIKKALLDFLDQYMSDKKDFPELLRLTVPMPEINLLAWLKNQAVDQKIYWFDKKTGLEVAAVGVADMVAGAQVENYAAVIGRVMKYAGNENFDGKYYGGFSFYKDIAPDDIWADFGAYRFILPRFEIIRKDGVYTFVCNFIQPEVESVFAVARELEVLNFQEVSFNHETSKLSDFITRPDKTQWREMIRTALRHIRQAEYEKIVLAREIELQFLSHIDPFSLMSVLRERNSQTINFCIQNGKHQVFLGSTPEMLYRRTDREILSEAVAGTRPRGRNAAEDLALAMALQTSEKEVREHGFVAESLRRNLDRLTDKLESAGEVTVLKLARIQHLYLPFSGILKAGVTDGDILEALHPTPAVGGFPEKSILPILKETEPFNRGWYAAPIGWIGAGESAFSVAIRSALVTRNKIMLYSGAGIVEGSSPDNEWDELENKLFHFKRILGVDGQSLEKHQQLLGISSY

SEQ ID NO: 93573 - protein, 471 aa, Calothrix sp.
  misc_feature (1)..(471): tr|K9PDY8|K9PDY8_9CYAN Isochorismate synthase OS=Caloth rix sp. PCC 7507 OX=99598 GN=Cal7507_0459 PE=4 SV=1
MTVSPCRTSFFVEHKDLYQSLLNVQENCLKNNCRQIVSISLDIDLVDPLVVLDKLSQANEINFYFENKGKGEAIAALDAVAKLHVDGVERFTKAEHFIKNCLQNIISFGNTNLPFSGPHFFCYFSFFHQNSQIDYPFPSANIFLPRWQIAVKNQRCILVTNTIINASANIPQILQTLWSKIAIIQSLEYYSSNIDSSPIKLSKKSVTNAAQFKLSVSSILEKIQSQHLNKVVLADALDVQSSNNFNLFKSLNNLRQIHPNCYIFSTSNGKGQNFIGASPERLISIHQKQLITDALAGSAPRGKTPAEDAANANSLLNSEKERHEHLLVIDFITQRLSQLGLLPQILPPRLRQLSNIQHLWTPISATVPANIHPLKIVAQLHPTPAVAGAARDIACREIRRYENFERGLYAAPLGWVDAEGNCEFIVGIRSALIDGDRARLYAGAGIVAGSDPEKEFAEVQLKLQALLKALV

SEQ ID NO: 93574 - protein, 445 aa, Campylobacter jejuni
  misc_feature (1)..(445): tr|A0A4V6K5R4|A0A4V6K5R4_CAMJU Isochorismate synthase M enF OS=Campylobacter jejuni OX=197 GN=menF PE=3 SV=1
MKQISAIIEQLDTTLAGEWPDTAGIRQFSYSLQKQPDTGLLEWLAAQPCYPKFYWQQRDGKEEAAVCGDAYAFGDTAQAQAFIRQYPEVPDLHIWGLNAFNGAEGSNFAANALFLPRIELCRQANTYWLRCTLFSPHSLRDEARRTRLFLRSLVASRALPPIASRVLQHQHLPAEPQWNQLIDRALTGIEQHQFDKVVLARKTTLTLSQPLNACAFLAASRDVNHHCYHFMLAFTPQRAFLGSSPERLFLRDHGELYTEALAGTVANHPDDHEAQKLGAWLLGDGKNQRENLLVVDDICQRLQGGAHSLDVTPAEILRLRKVQHLRRNIHGELAEPDDAGCLQRLQPTAAVAGLPRQAAREFIAEFEPFDREWYAGSAGYLSAEQSEFTVALRSAAVKGHHLELYAGAGIVAGSDAAQEWQEIENKAAGLRTLLEEHYTPAVQAG

SEQ ID NO: 93575 - protein, 466 aa, Unknown
  misc_feature (1)..(466): tr|A0A524QTE3|A0A524QTE3_9BACT Isochorismate synthase M enF OS=candidate division Zixibacteria bacterium OX=205 3527 GN=menF PE=3 SV=1
MADKSLSKAEVQHERLIDKLRKEVKRLLESAAIGGEAGISPIKSLAMAVEDCSPLDWLRSQNANRKVYWSDRSAKFETAGIGAADWIDESTHPDEHDGLKIIQDNLVASNDGVRYYGGFRFDNSSASDNDWRPFGKYFFVVPRFEMYRSSGRSWLVCNLFFKNDRNNPEDVLREFNKLSYVRPSENNDLQTLVSRTDSPDKTRFRDMIKSAMESFSRQQFEKIVLAKKADLEFDNAIDRLLLMHKLKRETSDCFHFYLQPTSDTAFMGATPERLYHRNGKRIQCDAIAGTRPRGDSEHEDQRMGEELLSSEKDRREHRFVVDSITEALSAKCDVTIHPADDPPTLLKLERVQHLYTRIECTLNNTVTDAQFVAALHPTAAVGGYPRAGIVDEIRRLEQFDRGWYAAPVGWISKNTAEFAVAIRSALARKNHLCLYAGAGILNGSNAAAEWEEIENKMRNFLKLVRQ

SEQ ID NO: 93576 - protein, 476 aa, Accumulibacter sp.
  misc_feature (1)..(476): tr|A0A011NRG2|A0A011NRG2_9PROT Isochorismate synthase D hbC OS=Candidatus Accumulibacter sp. SK-12 OX=1454001 G N=dhbC PE=4 SV=1
MTPRQLLDATQIAFLGRRLRALLDGARGNDLLSISLDLGGGDDDWLGVEDGAWPGVDLTRPACHWWAAPATSGGREYRLAIGRAIDFQSAGAARFSALQAAFAGLRAVWRHDDAQRSGRSPLAHLGFAFADESADGWPNAQLVVPAVLLQSAGGRRTATFSCVAAAGETALAGWLDGLRGNAWQPRRSPAPPLPETVGPLAGQAFMARVAAALQAIHGGQLDKLVLARSQRCTTDCAIDVATLLATLRDRHPGCTIYGVARGGEAFVGATPERLLALRQGTVQVDALAGSAWRAGGRGWAASPSLHDAKNRREQQFVVDAVRAALSPFCSTLAAPQAAEVLQSGALQHLRTTVHGCLQPGVAFFELLAALHPTPAVGGWPVATASRWLQSHGERRGAWYSGGIGWLDRAGDGDSVVALRCARINGRQAELFAGAGIVAGSDPAQELAETEVKLAVIADALRHARRRRPLAERAASA

SEQ ID NO: 93577 - protein, 483 aa, Atelocyanobacterium sp.
  misc_feature (1)..(483): tr|A0A086CIX0|A0A086CIX0_9CHRO Isochorismate synthase O S=Candidatus Atelocyanobacterium thalassa isolate SIO64 986 OX=1527444 GN=ucyna2_00198 PE=4 SV=1
MSITPIFIPNSTSFINNPCYLENLFATYQTKFKSHDQSVIISLSYVINAVDTLSVLNFLTNKNKSPSSSDTIYFYWENKVNNEEMLGYGATQYFCIDSSDRFFRSKNFIKDCLIKIIRIKEKKEIKSPPRIFSSFTFFEKIDDPHYPFPPALAFLPYVQLIKFKNSSILTFNILIEKKTDIKQTVFNILATKKSILSLKAYQNKKRKSKDIDRLDTNLAKIQKFKNSVNLILKSIKNNEFKKLVLADFLDLKNSVNFSIPNCLDNLRFHYPDCYVFAINNGKNHCFIGASPERLLSIKNQKLITDALAGSSSRDKDKYKDYYLSQKLLKSYKERYEHQVVIKYIVKSLLNIGLSPKVLPLKILKLSNIQHLWTPIYSKLEINIHPIDIVATLHPTPAVSGFPTAITCRKIEHYEQFVRGLYAAPLGWIDSNKNSEFIVGIRSALISHNNARVYAGAGIVKGSQSEQELAEIQLKFEGLLKALS

SEQ ID NO: 93578 - protein, 504 aa, Cyclonatronum sp.
  misc_feature (1)..(504): tr|A0A345UKC9|A0A345UKC9_9BACT Isochorismate synthase O S=Candidatus Cyclonatronum proteinivorum OX=1457365 GN= CYPRO_1680 PE=4 SV=1
MIRTKTSDLHTKADNNRSVLPLQDDADFVACAKEAVQLTKVAKEPVIFSVTVSFESIDPLAVLEILAESDQFQYYWEHPEERLALSAGRAIRTISCKGKCPKANTNGAFTDRFSGTSEAIKAVCEDIVEYSAIRHSLAGVHFLGGFSFFDRQDAQAWKNFHAADFVVPEWSFVRDGKLCLLTVNKEVPRNVNAEKLTEGIRATIDRMATQLLKSTSAALYETSSHKSDTPEVIEEPDSLENWIESINEAKNLIRLGILSKIVLSRMLRIRLSGRQQPTRILNQLRNEYPSCYTFMMRPEGKTAFVGSTPERLLSIRSNYILTEGLAGSISRGKSATEDTILEKQLLNSEKDLEEHRLVVEDIREKLRNFCDEVNHPPQPGIKKFTNVQHLYTPISAWTNNKYDPFVILQSLHPTPAVGGVPSRKALGLIPEYELYERGWYAGPVGWLNSKGRGEFVVAIRSGLITEHEALFYAGCGIVQDSDPVAEWEETKLKLIPMLTAINHA

SEQ ID NO: 93579 - protein, 554 aa, Dadabacteria sp.
  misc_feature (1)..(554): tr|A0A3M0ZHV2|A0A3M0ZHV2_9BACT Isochorismate synthase O S=Candidatus Dadabacteria bacterium OX=2080303 GN=D6815 _05630 PE=4 SV=1
MCRWRGERLRAAKLRVDPRRARRSGAGPALGRAPGYPRSGPPARGLAALGLRHLLHARRAAARRVAVATRSLPLPIRLACVPSGRGRVGRDAQERGIYRRDETVAHRRCGAVRAGDPRERCRGTRVTGYPGLGNRPAGSRLRVERQEVGDPLGALARWIHERPLFYFEHPASGRAIVGVGLAAAIATAGPERFRQAAGSATELLEALALPEERPYVRLVGGFGFAPAEASAVEWREFPPLSLMLPQQAWVWNEGQCWQVSCEAALELPGQQRSEKERHFLKHSPEPGAGESDAQWLERVERVLADIEQGRLRKLVLSRRRIERLSGTLDILGVLDRLRARRRSCYTFLVAPGETLFLGSTPELLVRKQGLAVETQSLAGTTARCGHDDEAAARLRHSAKDAREQAEVTRGIIEALGPVASRIAIEGSPRVLAVPEAYHLHTPIRAELCRPASVLEVAGLVHPTPAVCGTPRAEAARRLAREEPERGWFSGGVGWMDGCGDGEFAVALRSVLIDGHACTCWAGAGIVAGSCPQAELEETETKMSAVRSVLEECLA

SEQ ID NO: 93580 - protein, 416 aa, Eisenbacteria sp.
  misc_feature (1)..(416): tr|A0A538STV5|A0A538STV5_9BACT Isochorismate synthase O S=Candidatus Eisenbacteria bacterium OX=2212470 GN=E6K7 5_10045 PE=4 SV=1
MPVPQKSPWECLTRAAARAYGQALFLWEAPRGEAFGGIGAACRIEARGPGRFEEIRRRVSELLADAEHRGSVPAPFPGPVAIGGFAFGERDAEGPYSGFGDALFYVPAQMFWNAASGETMETRWTAEGPAAKSAPPERNPEDGALPGGEMARARWNEAVRSSLDRIREGGFSKVVLARAEAIPLRQDASALTIMESLRSAYPDCYRFLIDDGEGNAFLGASPERLVRLAHGEVLSEAVAGTLRCDPGDDALALAQELAGSEKNRSEHRIVLDHLLQTLGPVCEALDAPRGPEVMRLPHLLHLRTKVAGRAHAGANVLDLVSRLHPTPAVAGWPRAEALAWIARAEPEDRGWYAGPVGWVDAKGSGDFAVGIRSITMRGRTARLFAGAGIVEGSDPDLEWSEIDLKMKGIQDAIARD

SEQ ID NO: 93581 - protein, 446 aa, Enterovibrio sp.
  misc_feature (1)..(446): tr|A0A2A5T261|A0A2A5T261_9GAMM Isochorismate synthase M enF OS=Candidatus Enterovibrio escacola OX=1927127 GN=m enF PE=3 SV=1
MNTLSMLSQITERLSSPFSWPTDHDPIEWLDAQSIYPKFYWHSRDGNEETIALGQVKTFSNPMSAEYTLTEGQFIWGGCSFDGRTECGQCCFQSFFFLPQIEVSRFNEQWFLSINIGNDLLKTKATLAKLSDSFSSLASPQCNIVKMVHKPDYPRWSEMIDRALTDIEYTVLRKVVLARKTTLTLDRPLSATQLLKASRDKNSANFHFMLAFDAKHCFVGSTPERLFIRQEEKLRTEALAGTIGRGITIEDDLALSHWLLNDPKNIYENKLVVDDIADQLAQYCVSFYVEELPHLVRLRKVQHLKREIFVQLNKDILSTTLLEALQPTAAIAGLPRESAMSFITKNEPFIRGWYSGSVGFLSRERSEFCVAIRSAFVMDNLIHLFAGAGIVPGSSPKIEWNELDKKISTLLCLLKPLEFKSKTTRIIDKMCLERWKKERDESIPPK

SEQ ID NO: 93582 - protein, 468 aa, Heimdallarchaeota sp.
  misc_feature (1)..(468): tr|A0A1Q9NBI5|A0A1Q9NBI5_9ARCH Salicylate biosynthesis isochorismate synthase OS=Candidatus Heimdallarchaeota archaeon LC_2 OX=1841597 GN=pchA PE=4 SV=1
MQSLDDFCSKIKEYKLQKESIEIISYTTKFEKFVNDVCFNKTFSNIKIFPRMYWSHPEDGKIIGFGSVGEYASSEFEYNKLDNFISSIQKSILSNIENHEMIKILGGIAFNQLDAEAKSSDEWQKFPNTYFFLPKIIISTIDNEIFITLNLKLDLIRSSSVKEEFDRLLVKITSHFVKLGNNNIELSHILVNNQNSTQSFDQWKENISKIKILIENSSLEKLVLANSKILQLSKSINIGNCLDYLLKNYSEAYIFALEIEESNIFISATPELLVHKSNGKLISDAIAGSRPRGIGYDEDLKLENDLLLSKKDRKEHKFVVEQIIKKLTDAGLQKIKTNEPYVVKLKNIQHLKAEINADCDKSLPELIQILHPTAAVGGVPSEQALHNIIILENMDRGWYASPVGWITCEDSGKFVVAIRSALVKDLKVVLYAGAGIVSDSDADAEWKEIGVKFEPMMKALGVGNVNPQ

SEQ ID NO: 93583 - protein, 473 aa, Hydrogenedentes sp.
  misc_feature (1)..(473): tr|A0A3M1I4F9|A0A3M1I4F9_9BACT Isochorismate synthase O S=Candidatus Hydrogenedentes bacterium OX=2030809 GN=D6 767_08850 PE=4 SV=1
MLQPKTDKFLEYSISELKEQAYQSLLSKPDNEIVLLRVILPPISHFKKIYPALQSKLLPQFYLKDRKGEKIYLAQGSLLEIASHSDYHAAKEAYVALENLPEGSKLFGGFSFFPKPQTNPWESFPVSYFFLPNFLWEFTKENTVLYMHFFKQHDEKENQDAIHALFDSLTQNLSLGTFTNVNPREPSCTPTFPQYKEIVEYALKNIRWNHFKKVVLAREVQCNCSLTAEEVLEALDNGEPSFLFYFRPDETSVFLGRSPELLLDIKKGATGASIVTEAVAGNRPRSKNPVENGNKEQELLHSEKDIQEHDFVVKYIEEVLDEFTTNLFTTTSNTLKVLQNVHHLYRTFRGKLKPYTSEEEILETFHPTPALGGYPKRKSLRFLEEHEIMDRGWYGAPIGFISARHSLFLVAIRSALLQGNRMHIFSGSGIVRQSDPGLEWQELNVKIKHFLDILEKADPKEVEKLKSLLSIEC

SEQ ID NO: 93584 - protein, 468 aa, Kentron sp.
  misc_feature (1)..(468): tr|A0A450X081|A0A450X081_9GAMM Isochorismate synthase M enF OS=Candidatus Kentron sp. LPFa OX=2126335 GN=menF P E=3 SV=1
MMRHSSPGFGDIGQSLPITEALRYLRESLGAVTIARRGITRIEAPLPAMDILGWLRTQRAEEKWYWDDNRDGSLILGGIGAADVIHDITAMDARAVSNRIHAMLGEDLQARLRGRYFGGMTFLPSPYVDNSWQHFGCYRFVLPRLEIVRMGKHHIMGLNLLPDDTNPQAMDDIRRMLEAIATTPKTDTPLFPMIEQRQDIPDRDGWEALLTRAIADIRNGIINKVALARKVILTLDSMIEPLDLMWSLRHREPNTLHYYLQPTPEQCFLGASPELLFRQSSEMVYTEAIAGTRRRGANSAEDAELGQDLMTHAKDAVEHQSVVDRIVQGLRALQATVFAEASRLHKMTRVQHKHTPIAAWLPPDCNAGDLLSILHPTPAVGGNPREAALAFIREHEPFERGWFAGVVGWIGYNRAEFAVGIRSALAEGNRLSVFSGAGIVAESHIPSEWQELEDKIAHILGLFTQGTL

SEQ ID NO: 93585 - protein, 477 aa, Latescibacteria sp.
  misc_feature (1)..(477): tr|A0A1V5ZT88|A0A1V5ZT88_9BACT Salicylate biosynthesis isochorismate synthase OS=Candidatus Latescibacteria ba cterium ADurb.Bin168 OX=1852850 GN=pchA PE=4 SV=1
MIGPGISPTPCLQCAIISGEAFSFLRDQLSAPVEKHRFRAVTVPIERTWLTGGLKLGGTEPWIYWATPSGEETLAWGAAWKTAPDAQNRFAAAQSAASTLWDRIEWRGFPRTRKPHIRIFSGFAFDPAGPYGTEWNGVPSNYCVLPSICITCARGSFRATVISGRDLHGEALHGFSEFLGTLRAPLTEAREDRAFAPATPHETTGEDLHERWLRSIASIKDGITSGIFQKVVVARSVLQSLPRKPDIGRALDLLALRYPDSYRFAAYFGEKLFLAATPELLVHKRGPRFVTHALAGSMPFHGNAQAERAARRALMRSAKDSDEHSLVVEAIRRSVGGFAKTLEVSTSPRIILYGDIAHLETPLEGALEDDVHVLRLVSAIHPTPAVGGVPSDEALKWIRANEEVPRGWYAGPIGWFDSNGDGCFVTAIRSALVAPGSARLFAGAGIVAASDPATEYEETEAKLKPMRLALGLAHDVR

SEQ ID NO: 93586 - protein, 469 aa, Marinimicrobia sp.
  misc_feature (1)..(469): tr|A0A3M7KJF8|A0A3M7KJF8_9BACT Isochorismate synthase O S=Candidatus Marinimicrobia bacterium PRS2 OX=2483458 G N=EB821_04225 PE=4 SV=1
MVELTKEKNLEQGILKSLEKAAANGESILFSFSFRFEVRDLLPILTHPSDKNTTRFYWEQPSQGFSFAGLGSILEFQSTDIENSEEINNQIKNTMEMGISVTDNSLIGPRIIGGFAFNNYRGDDDTWKNFPRKHFLLPECLGTSTDDGTWLTISRMVQPNEKLNTIINEFTRTIIFYENRLPVTLPPISRVAVDKFRDVPNRSTYDNTIFSVLENIKPGQLEKVVISRSHHVKVGKDFSVISAMQVLRNAYSNCTSFFFSLPGKGTFFGCTPERLIRLKNGYVQTEALAGTIARGNNMEEDRILGEILLDSHKEREEHNLVMEQIIRKLEPIIPNIQFPKSPQILKLKNVQHLQTPISGELENGEQVLDLVERLHPTSAVAGTPTDKAMQVIGKMEAHDRGWYSGPIGWINDKGDGEFYVALRSALVKDEEAHVFAGGGIVSESHPDTEWEETELKLQPIISALSGGQI

SEQ ID NO: 93587 - protein, 438 aa, Microthrix sp.
  misc_feature (1)..(438): tr|R4Z6L8|R4Z6L8_9ACTN Putative isochorismate synthase OS=Candidatus Microthrix parvicella RN1 OX=1229780 GN=B N381_430048 PE=4 SV=1
MADGRTEADELHAVTTRAGTGDDPLDHLAAGAMAFRSPNRTLVAHGVARRVELGRTGGWANDVAAISEALAAIDREGRDGEPASGPVAFCALPFDRRRTAAVTIPRLVRGRDVHGSSWVTTISPANPAAGTTPSPPFPSGRSTNHLATDPTGSELGGDTAAISGPPPELRLRASIGDAEWMAKVDELTRHMAAGQLEKAVLFRELRLTSEAPLDPIALYRRLLPTAPAGYVFCLDGFVGASPELLVSRIDDTVRAEPMAGTLPRSGDPQTDLRRAGELLRSEKLRHEHAVTIERAHDALLGWCSYLDAQPEPLVVEAGAVLHLATLVEGRLSHPAPTVLDLVAALHPTPAVGGWPIAEALELIDELECLDRDRVGGAVGWVDADGNGEFAVAIRSALLDGTTARLLAGVGIVADSDPQAELEETRAKFAAVLPHLIRP

SEQ ID NO: 93588 - protein, 474 aa, Moanabacter sp.
  misc_feature (1)..(474): tr|A0A2Z4ADX7|A0A2Z4ADX7_9BACT Salicylate biosynthesis isochorismate synthase OS=Candidatus Moanabacter tarae OX=2200854 GN=pchA PE=4 SV=1
MIKISPGLYVERDFEGLLRFLTDCRDSALRDNHYKVASISLEVKHLDSLAVLESIYESDELHFYMEHPIKEEAIAGADAILEKTFHGPGRFQQVLQFSNEILNHTFAVGDLHVPFWGPHFFTAFTFYDKSGKDTSFSPATVFLPRWQVGRKEGIYGAVANIVVYPTSDPVELAERTWAAHKKFAAFDYSSVESAPKLAQKKEHKIRELGGDGAFLHSVKQACQGIALGRYEKIVIAKCIELIGPNELKPLVSLNSLRNKYPGCYAFSFSGGSEKSFIGATPERLVRVEGDFVYTEALAGSISRGATAAVDASFAQALLESAKNVDEHRFVVDFIKDCLESIGMEVEFSAKPNLLQLPNVQHLRTPIKARKPEGLHLLDTVKVLHPTPAVGGVPQEPALADIRRIEPFSRGLYAGTLGWFDHGGNGEMVVAIRSALIEGNTARAYAGNGILVNSSPEEEGIEVDLKLQALLQALH

SEQ ID NO: 93589 - protein, 486 aa, Omnitrophica sp.
  misc_feature (1)..(486): tr|A0A357BGY9|A0A357BGY9_9BACT Isochorismate synthase M enF OS=Candidatus Omnitrophica bacterium OX=2035772 GN= menF PE=3 SV=1
MLTPIRSWGGSPRFIRGIKGGEVSLMSLSRMDHKISAEQLRNHVAEHIHQLIGQTDPVANPQKILRIEFPCESVNVLAWLNQQKGYEKIYWLDRAGELEMAGLGVADILQGERNPDVQKIFAYFQSRLSSKFPRLRYYGGLSFDKMPMNTEWQPFGQYRFWIPRFELLQTQSDTFFAINLTCEDIRQKNIEPLLLEVSALQFPSLESRKFLPKLLARSDQPNKEDWDKLFVKVKSQLKTGGYEKVVLARKSLLRFSDPLNPMDLVERLKSQTENCFHFCFQVSPDAAFLGATPERLYKRIGRAIESEAIAGTKPRGLTLHEDEQFRNELLNSTKDAAEHRYVVDFIRNAFIEMCADLTFDPFANLLQLKGGHHLITRFSGRLKNGVEDDHILTSLHPTPAVGGYPAQEALKTIEETEPFNRGWYAGPVGYVGYDSVELVVAIRSGLIHQNSLSLYAGAGIVAASQSKEEWDEIENKIGSFINVLNS

SEQ ID NO: 93590 - protein, 328 aa, Ornithobacterium sp.
  misc_feature (1)..(328): tr|A0A383TZV4|A0A383TZV4_9FLAO Isochorismate synthase e ntC OS=Candidatus Ornithobacterium hominis OX=2497989 G N=entC PE=4 SV=1
MDLKNLSSPYILYRFPDEENFVFEELTIADKNDFTFQIQSFNQEKNYFFKGLKNFEINPKDFPSENLNEISQGLKNFESPIFTWEIYRNKCDFFIQEIQKGRFEKLVLSRIFKGLENPNLGELFANLSKKYPKALIYLLHLGDEIWLGATPELLLEIKNNKLQTMALAGTRSTENPHPWTQKELYEHQVVVDYISKALENLNPNVEETKTITLNNLQHLMTPISANWSDESSVEHLISRLHPTPAVCGLPQREAFEFILENEGYNRSFYTGILGFKNQTSITYFVNLRCARISHSRMDVFVGGGITAASQALAEWEETELKAKVLLDF

SEQ ID NO: 93591 - protein, 500 aa, Promineofilum sp.
  misc_feature (1)..(500): tr|A0A160SZ65|A0A160SZ65_9CHLR Isochorismate synthase O S=Candidatus Promineofilum breve OX=1806508 GN=CFX0092_ A0431 PE=4 SV=2
MSHQSRQHPTALPYHSPTVASQWESTPIAERPGRLVSLFVPAAELDPLSFLRGGYGVERFYWAEPSGGASMTLAGLAVAAEVRVPPVLDDAAPFSDQSDYRFDDVIEQTTRLFEGASFHAADAGDWGVAEVEMDNHPARPRLFGGLAFQDDFVPDNTWSVFSPAHFILPHFQLVQTGHEAFLTINALIAPDEDLLDALNGMREALMARLPAADAISTRRVVSPNLSYPLSPEMWAELVDQATTAIGAGEIEKVVLSRVCELRAAEPIDAAATLDFLNEQYGDCYRFLFEPLPHHAFFGATPELLIRKTGPRVQTMALAGSIPRGQSPGEDDRLAAQLLASPKERREHNLVVETIRRDMAADMTFLNIPDAPVVLRLKNIQHLLTPIEGQLMEPQLGVVPLLRRLHPTPAMGGAPAERALAFLRRHEPVPRGWYAAPIGWLDRQQDGVFAVAIRSAVTQHARAWLYAGAGIVAESQPAQEWAETALKFRPMLGALGAGEAV

SEQ ID NO: 93592 - protein, 442 aa, Providencia sp.
  misc_feature (1)..(442): tr|A0A0M6W7Y2|A0A0M6W7Y2_9GAMM Menaquinone-specific iso chorismate synthase OS=Candidatus Providencia siddallii OX=1715285 GN=menF PE=4 SV=1
MTSESFYKLINEIIKYLYKLKIQTNEYICIIRYLNKGILFSWLSWLSKQIFYPQFYWYHRNGIEESSVLGIVNSFKSIIDAEFFLLQHSECSNLRIWVLNGWNDMNEYESGFFKHSSKIFFIPRLEIFRIHSSITFSLNINGKKDISEAIVFLQNLKFSFDFSEKLFVNIVTEEYFPNYNEWCYLLTKAIREINSGNIRKVVIARETKLILSNAISVSNFLLASQKVNYYCYHFMIAFSKNSGFISSTPERLYLRKNLQLFSEALAGTVVNDIDEVIAYERLKWLIKDKKNQYENLIVVNDICQQLKKISSNIFISKTKVVRLRDVQHLCRFINATLIKPSDSKCLSCLYPTAAICGSPRVPARNFLLKNEPFHRNWYGGIIGFISLSTSEFAIAIRCAQVNGSKVSLYSGAGIVNYSDPYQEWVEIENKIVCLKSLFDITM

SEQ ID NO: 93593 - protein, 400 aa, Rhabdochlamydia sp.
  misc_feature (1)..(400): tr|A0A486XM52|A0A486XM52_9BACT Menaquinone-specific iso chorismate synthase OS=Candidatus Rhabdochlamydia sp. T 3358 OX=2099795 GN=menF PE=4 SV=1
MKTFFVNNTPFSYDSYFIDFSYLSPISWLASQDIYPKVYWKDKHTQTTHMALGSLLCYSDIPHIEQTEDIDLRFFGGIHFPESAWEKDLPSTLFFLPRFEVVQTDDKITLIAHFINQNSDPLIFRDLKPETPIGQITPCVKVSHLPSWAEWEKNVEHVLSIKALEKIVLARQTQFTTTPAWPLLQALEKKAETATCFAFEFSKGSTFLGATPETLFHRKKNVVFSEAIAGTRPRGTNEDELACELRSSAKDNREFNFVKNFIEKALLPLSSQLNWQEDQILRTTSVQHLYNKVIATLTSDCTDQKILAALHPTPAVCGTPTQEALKLLKSLEPFQRGWYSGAIGWLGTKGADIAVGIRSALVTNSCLKIFAGAGIVQGSNPLKEWEELEAKTAAFCRILS

SEQ ID NO: 93594 - protein, 408 aa, Streptomyces sp.
  misc_feature (1)..(408): tr|A0A367F9X3|A0A367F9X3_9ACTN Isochorismate synthase O S=Candidatus Streptomyces philanthi OX=371608 GN=DTL70_ 05555 PE=4 SV=1
MSVPLRELPASTDERRHTRPGPSLSPGAATALLDAYRSGTDRLLATPHRTLLAHGTAAETPHDARPLPERVRHLLDARRKAGDPAPLVVGALPFAPDAPAALAVPERVRCAPPLREDPLVVLPVPEREAEGRWEMREVPSAERYGQAVASAVARMRAGEFDKVVLARTLELTAPGEPDLPAMLRRLARRDPAGYTFAVPSGPGRTLVGASPELLVARRKGHLTANPLAGSAPRSDDLAEDVRRAAALLESPKDLHEHAVVVDAVREALAPYCSRLETPPRPTLVRTAAMWHLSTTVTGELSDPSVTALELASALHPTPAVCGTPTRTAREVIAALEPFARGPYTGMVGWQDADGDGEWVVTIRCAEAEGSRLRLFAGAGVVADSSPEAETAETAAKFRTFLDAVGAAL

SEQ ID NO: 93595 - protein, 473 aa, Viridilinea sp.
  misc_feature (1)..(473): tr|A0A426TTF2|A0A426TTF2_9CHLR Isochorismate synthase O S=Candidatus Viridilinea halotolerans OX=2491704 GN=EI6 84_18230 PE=4 SV=1
MLGVSVATAAFLQRSRMEELAERARRRARRLGRPVLVSVTTELKPRDPLALFARGLGVTHNRLFWSRPADGLAVAGLGAAWSFAATGPERFALAAHAWRELVEHAEVSADPALPFSGPMAAAGFAFDPLRPTLGHWDGFADGLLLLPRLTLATDGARTSLTVNGLVGPTTSSIQLHLAAVRRLRDLLGRAWQVPRVGAGLELFDALPPGAWRAMVADAVAELRAGTLEKVVLAREVCARSTTPFDPATTLAALCRDYPDTFVFALARGGRTFLGASPERLVSLRGHTVAASSLAGSAPRGANPAEDAALGQALLASPKDRVEHAVVTQMLLAALRHACTEVVVAPEPTLMRLRNVQHLFTPLSATAAIGTSILDLVARLHPTPALGGQPREAALAWIRQHERLDRGWYGAPIGWVDLRGQGEFAVAIRSALVGRYEASLFAGAGIVAASDPEREERETEIKLRAMLGALGDSR

SEQ ID NO: 93596 - protein, 405 aa, Candidimonas sp.
  misc_feature (1)..(405): tr|A0A432DMV9|A0A432DMV9_9BURK Isochorismate synthase O S=Candidimonas sp. SYP-B2681 OX=2497686 GN=EKL30_14075 PE=4 SV=1
METPAIAATQNVSVQPGSTGDQWLVDNFAVGDFFFASPDKQYRACAKDGVVSAYQAVSRDVVKALFEQASQQGVQAPVMFGLVPFDVANAASLAIPVKHTSAGIPPKASVAASDLPPQQTRPQVVSREPVPAPEQYGDMVRKALGLFDQGELKKVVLSRAMDVQLDRPVDYTRLLPDLLSRNAHGYTFAVPVWADGADAAPTGVMVGASPELLVRREGDRIYVNPLAGSIGRNSDAETDQALKDGLARSEKDLREHGYVVSDIVRILRMHCDELDVPDGPSVIGTDTLWHLSTYITGRLSDTTMTALDLSLALHPTPAICGHPTATAFGHIRDIEPFDRGYFAGLVGWQLANGDGEWALTLRCALHDGGSKLRLYAGAGTVAGSDPESEIKETATKMETFMRAIS

SEQ ID NO: 93597 - protein, 355 aa, Capnocytophaga canimorsus
  misc_feature (1)..(355): tr|F9YTE6|F9YTE6_CAPCC Isochorismate mutase OS=Capnocyt ophaga canimorsus (strain 5) OX=860228 GN=Ccan_06880 PE =4 SV=1
MEKNTLQYNEIIGKATELLEKEIPFVIFKNPNSMQIQLIHQEDNQLFYFNDSFSVEGFVLAPFDKEKPTIFLPAEYAFEAQIESIDVPTATNENLPNDEEETFRYKKMVEQTIETIQNGVIEKVVLSREISILQEGNPLSSFERMIQKYADAFCYLFFHPEVGTWLAATPEILLKIKGNQITTMALAGTQPYVEQKDIIWKEKEKQEQQIVTDVIVDKIQERVNQLQVSEPQTVRAGSVVHLCSHIEATLKEEQDVFSVVNQLHPTPAVCGFPYEKAFEYIAQNEGYDREFYTGYCGMISNIAENILDFYVNLRCMKITAERISVYVGGGIVSQSDPESEWQETQNKARTMLSVI

SEQ ID NO: 93598 - protein, 347 aa, Capnocytophaga canis
  misc_feature (1)..(347): tr|A0A0B7IT10|A0A0B7IT10_9FLAO Isochorismate mutase OS= Capnocytophaga canis OX=1848903 GN=CCAND93_530006 PE=4 SV=1
MISYSEILKKAILLQESEVPFVIFRRPNEKQINLYNQIDNQVYIFEDSFANEGFVLAPFQNITHKKILLKSEEKYVANVEDFHFQFSDRKLPFDEGQKQNHIKLIKKAVQTMQNSELHKVVLSRKIAVPYHKNPVEIFQKMIENYPTAFCYLFSHPKVGVWLAATPETLLKFSENQLYTMALAGTQPFKEGIITWQQKEREEQQIVTDDILDKIKLYTENKKVSEPKTVRAGGVVHLCTHITADLQADRNPFDVVTQLHPTPAVCGFPFEAAQQFILENESYDRIFYTGYCGVVEQQKFDLYVNLRCMQLEENQAYIYVGGGVLKESIPDSEWDETQNKAQTMFRIL

SEQ ID NO: 93599 - protein, 347 aa, Capnocytophaga cynodegmi
  misc_feature (1)..(347): tr|A0A0B7HJ54|A0A0B7HJ54_9FLAO Isochorismate mutase OS= Capnocytophaga cynodegmi OX=28189 GN=CCYN2B_410001 PE=4 SV=1
MTIFNKIIELYNSGIPFVAFKKPNSNIIEVFEQSNDVVYRFDNSFSADGFVLAPFHNDDNSSIIIKADKKYQEELKSNHINAPIKKEIPFSNFEKEQHIKLIEKAIVQMQKGNFEKVVLSRKIIINYKANPVNVFEKITKHYSSAFCYLFSHPKICTWIAATPEKLLSINKNHFYTMALAGTQPYNETGKHTWKEKEKDEQQIVTNVIVHKIAPHVNNLDVSQVKTVRAANVVHLCTDIVAELKSNENPFIIVDKLHPTPAVCGFPYNEAKQFILENEHYNRSYYSGYCGIVDSKEHSIDFYVNLRCMQIENNQVFIYVGGGILKESNPQAEWEETQNKAQTMFAIL

SEQ ID NO: 93600 - protein, 351 aa, Capnocytophaga gingivalis
  misc_feature (1)..(351): tr|C2M350|C2M350_CAPGI Isochorismate synthase OS=Capnoc ytophaga gingivalis OX=553178 GN=CAPGI0001_0695 PE=4 SV =1
MILSPEDFLQKAKEVAAEGLPFVLFKYPNDTQIHLISQNDKNLYKVKDFTEKGFVIHPFVGIESFLLRQDNLFSTAFVGEEKKDTLPSPILSPSARVEYQTLFGKALKAIDKGELTKVVLSRRIAYTKAPKPLLTYFQDLVQAYPTAFCYAFSHPKIGKWVAATPETLVKIEDNQLRTMSLAGTKPFVEGEKPLWTEKEYREQQVVTDTIIKVLSPYTTDLSTGKIHEVRAGRLWHLCTEIMAKIAPHTKIKQIVNNLHPTPAVCGFPTEKARQFLLENEGYPREFYAGYCGLVDFKHKNSLDLFVNLRCTQLTDKEVFVYVGGGVNSGSQEESEWQETENKAQTMLRILQ

SEQ ID NO: 93601 - protein, 351 aa, Capnocytophaga granulosa
  misc_feature (1)..(351): tr|A0A381DS88|A0A381DS88_9FLAO Isochorismate synthase d hbC OS=Capnocytophaga granulosa OX=45242 GN=dhbC PE=4 S V=1
MNQSKEEFLEKAKEVALRGLPFALFSYPNSADIHLIYQNDDTLYTTNLCEGDGFIMCPFYGGTPLLLKQEHHLTTPLFSVEKPILSADLIPTQGDREHYHTLFQKALKAIEGHTLEKVVLSRRIAYQGNQKSLLTYFQDLKALYPTAFCYAFSHPKVGRWLAATPETLIKVVGDTLCTMSLAGTKPFVEGKSPLWTEKEYREQKIVTDTITQVLHPLTTDLSIGKVHEVRAGRLWHLCTEITAKITSNTPIQEIVQRLHPTPAVCGFPTDKARNFLLENEGYPREFYAGYCGLTHWGAHRSIDLFVNLRCAQLTQKEIFVYVGGGVNSGSQEESEWQETENKAQTMLRVLQ

SEQ ID NO: 93602 - protein, 314 aa, Capnocytophaga ochracea
  misc_feature (1)..(314): tr|A0A2X2SYZ6|A0A2X2SYZ6_CAPOC Isochorismate synthase e ntC OS=Capnocytophaga ochracea OX=1018 GN=entC PE=4 SV= 1
MEQEDDTLHFFNTDKEEQEGFVFAPFDANEPAVIITPNKVTVSHLPTQSIVENTNIDILEDTKTEKQKHIDLVTKAIDEIHRGHFEKVVLSRKITIKEVVNPFKSFANMVTRYPSAFCYLFYHPKVGTWLAATPETLFRSNGEDFCTMALAGTQPFKEGEIHWHTKEKEEQQIVTDTIVQQLQEYVNELEVSAVKTVQAGSLMHLCTEIKGKIAPDKVYELIKRLHPTPAVCGYPTEEARTFIIENELYKRQYYTGYCGWVSNNNQAFYVNLRCMQIEREQSYLYVGGGITKDSIPEKEYEETQNKAMTMMTII

SEQ ID NO: 93603 - protein, 355 aa, Capnocytophaga sp.
  misc_feature (1)..(355): tr|I8UPF3|I8UPF3_9FLAO Isochorismate synthase OS=Capnoc ytophaga sp. oral taxon 412 str. F0487 OX=1125721 GN=HM PREF1321_0355 PE=4 SV=1
MRIETEDYISFEELLKQVQHKYAEHLPFVCYKPPHHTSVILLGQEDDTLHFFNTDKEEQEGFVFAPFDANEPAVIITANKVTVSHLPTQSIVENTNIDILEDTEAEKQKHIGLVTKAIDEIHRGHFEKVVLSRKITIKEVVNPFKSFANMVTLYPSAFCYLFYHPKVGTWLAATPETLFRSNGEDFCTMALAGTQPFKEGEIHWHTKEKEEQQIVTDTIVQQLQEYVNELEVSAAQTVQAGSLMHLCTKIKGKIAPDKVYELIKRLHPTPAVCGYPTEEARTFIIENELYKRQYYTGYCGWVSNNNQAFYVNLRCMQITDNEAYLYVGGGITKDSIPEKEYEETQNKAMTMMTII

SEQ ID NO: 93604 - protein, 355 aa, Capnocytophaga sputigena
  misc_feature (1)..(355): tr|A0A2A3N2N5|A0A2A3N2N5_CAPSP Isochorismate synthase O S=Capnocytophaga sputigena OX=1019 GN=menF PE=4 SV=1
MRIETEDYISFEELLKQVQHKYAEHLPFVCYKPPHHTSVILLEQEDDTLHFFNVGKEEQEGFVFAPFDTNEPAVIITPNKFTISHLPTQSIVENTNIDILEDTKTEKQKHIDLVTKAINEIHQGTFEKVVLSRKITIKEMVNPFKSFTNMVTRYPSAFCYLFYHPKVGTWLAATPETLFQSNGSNFQTMALAGTQPFKEGEIHWLSKEKEEQQIVTDTIVQQLQGYAEKFEVSAPKTVQAGKVMHLCTIIKGKIKENKAFEIIQRLHPTPAVCGYPTDKAHKFIIENELYNRQYYTGYCGWVSNNNQALYVNLRCMQITANETSLYVGGGITKDSIPEKEYEETQNKAQTMITIL

SEQ ID NO: 93605 - protein, 463 aa, Carnobacterium divergens
  misc_feature (1)..(463): tr|A0A2R8A3S9|A0A2R8A3S9_CARDV Isochorismate synthase O S=Carnobacterium divergens OX=2748 GN=menF PE=4 SV=1
MVELPVGLVAQVEELLTKQEKVLVSWVTKIESLNPLMIFKQGKGVYSTKRFFWQNPSKKVTLVGLGSTNQFCSNKGITSYQDVHEFNQQLKKQTATNQKRRATGALLFGGFDFDPERGESKEWQDFQSAFFYLPTYLVTVLSEETFLTINFYVDSQTDLHQKANEFFGKWEELLEEQIVPKAAKAVVTNKTELATTEWIQAVDETVKLIKQSTTLQKVVLSRQLLVEHDSVVDVEDVLERLMMTQQNSYFFVLENKEKAFIGATPEQLLAAENQHYYSACVAGSAPRGKTKAEDQVIGEALLKDHKNTHEHHLVVEMISETLRTLTMDLNVSGNPTLLKNRDIQHLFVTVEGKRQATVPFLMAVKAMHPTPALGGLPRNEALAVIREKEPYHRGFYGAPIGWLNQDDEGEFAVAIRSALLMEKQSILFAGCGLVAGSKSAEELIETRIKFQPMLRALGGLDHE

SEQ ID NO: 93606 - protein, 462 aa, Carnobacterium maltaromaticum
  misc_feature (1)..(462): tr|K8EKX7|K8EKX7_CARML Isochorismate synthases family p rotein OS=Carnobacterium maltaromaticum LMA28 OX=123467 9 GN=menF PE=4 SV=2
MWTLPSDISEAAKLKLEEHSSVLVSYVRELNELDALTLFKKGAKKYTGQRIFWQNPSKTVTLAGIGCTERYSSKAGNESYTELNQFKDKLKKQTVSNEIILGTGALLIGGFSFDSLAKADANWEEFQDAYFSLPTYLLTTTAEKSYITFNFYVTQADLIEKPLRIMKQWEELLATPFVTETEIAAITKKEELATDSWLAAVSETVDAIKASKELNKVVLSRQMLLTHETDVAIEAVLEKLKKTQQNSYFFVVENGEKTFLGATPERLLSAEGNKFYSACVAGSAKRGATFAEDQAIGDRLLADHKNVHEHQLVVEMIRHTMEGFTTDLAISGGPTLLKNRDIQHLFLTLAGTKKEHFSFLEAVKGMHPTPALGGVPTDLALEVIRQKEPYNRGFYGAPIGWVDSSDQGEFAVGIRSALIMGQQSLLFAGCGIVAGSDPTEELNETAIKFQPMLRALGGMENE

SEQ ID NO: 93607 - protein, 580 aa, Catharanthus roseus
  misc_feature (1)..(580): sp|Q9ZPC0|ICS_CATRO Isochorismate synthase, chloroplast ic OS=Catharanthus roseus OX=4058 PE=1 SV=1
MASITGHCVAHFTDLSTRKSSFFSNSNNNSSLFRRKSTNIVTRKKYIFCSTSLSMNGCNGDPRAPVGTIETRTLPAVSTPALAMERLSSAVANLKSTLPSAQSGIIRLEVPIEEHIEALDWLHSQDQKNLLPRCYFSGRSQVTFSDFTSNDLTNRNGSAANGHLQRISTSSDDKNLVSVAGVGSAVLFRSPNPFSFDDWLSIKRFLSKNCPLIRAYGAIRFDARPHIAPEWKAFGSFYFVVPQVEFDELHGSSMIAATVAWDNALSLTYQQAIVALQTTMEQVSSTVSKLRQDVSHTSLVSKANIPDRTSWDLTLNRVLEEIGNKYSPLTKVVLARRSQVITTSDIDPLAWLSSFKADGKDAYQFCLQPHEAPAFIGNTPEQLFGRDQLTVFSEALAATRARGESDSLDLQMAHDLFSSPKDNHEFAIVRENIRQKLDAICTSVETEPMKSVRKLKRIQHLYARFAGRLRSEDDEFKILSSLHPTPAVCGFPMEDARKFIAENEMFDRGLYAGPVGFFGGAQSDFSVGIRSALIGKDAGALIYAGLGVVEGSDPALEWQELELKASQFMKLMKLEAPALK

SEQ ID NO: 93608 - protein, 425 aa, Caviibacterium pharyngocola
  misc_feature (1)..(425): tr|A0A2M8RY96|A0A2M8RY96_9PAST Isochorismate synthase M enF OS=Caviibacterium pharyngocola OX=28159 GN=menF PE= 3 SV=1
MDSLQSIKKRLIEHINRYQAQDEEISCVRIQSKLSVNLLSWLKAQSNYPQFYLNFRDDAQIVATIGEVRCFDDTKAAQRFMQETQLPLFGGLTFYAHAGFFLPRLVLQQQNDELSVSLFIDNGKKNPTEERKAIAALLETFEKITALQPVRQQIRLTEQKAAQDQWCQWVEKALQRIRSGELTKVVLANETVFRTQNPLNPKDFLVESERCNFGCYHFLLQENPRSAFLGSTPERLYRRQGLLLQTEALAGTALMCEDEEQNRRQGEWLLQDPKNLYENWLVVEDISQNLQPYVRDIVVADSELKQLRQVQHLKRKIHAELLPDYGDVLCLDAIHPTAAVAGLPRDRAVRFLAETESFNRGRYAGAVGVMAPDCAEFCVAIRSAFIAADKIHVFAGAGIVEGSIPLLEWQEIERKALGLVSLLQE

SEQ ID NO: 93609 - protein, 400 aa, Cecembia lonarensis
  misc_feature (1)..(400): tr|K1L1B9|K1L1B9_9BACT Isochorismate synthase entC OS=C ecembia lonarensis LW9 OX=1225176 GN=entC PE=4 SV=1
MQKAVDIAVWDLEYYLGCLIATEMQEGRQIALWRKPKSNILEILIDKSEQPKRVELNIEELPSGFIVHPFEDQVDGKAFFLEADNYFKIDLSVPLEEQADRVDPLRKTLDPDQIKGIIQKNLGHTEVETELKSNRACSKKDFTDLVEKGVEAIKEGQLIKIVPARLKKKALGKGFDLIKSLKSILYAYPNAFINFFHIPGVGTWLGASPEILIQTKGDAFYTMSLAGTQKAKGDNPMKNAAWTQKEIEEQALVSRYIVDCFKKIRLREYEEIGPKTVLAGNLLHLRSDFRVDMKATNFPQLGSVMLKLLQPTSAVCGMPRNKAFEFLRTYEKLNRSLFAGFIGPVNVEGETSIYVNLRTARLTEKEAYLYAGAGVTEDSVPEKEWEETEMKCEIIGKHLK

SEQ ID NO: 93610 - protein, 423 aa, Cedecea davisae
  misc_feature (1)..(423): tr|S3ITT5|S3ITT5_9ENTR Isochorismate synthase MenF OS=C edecea davisae DSM 4568 OX=566551 GN=menF PE=3 SV=1
MQQELAGEFADEPGLQRLCVAVTLSDASDPLAWLTAQPLFPQFYWQQRNGNEEVAALGALLQFSALGQAQSFLQSHPGQPFLRVWGLNAFDPAQGFLFLSRLEWRRVGGEAHLWLHLYSETSLKQDAQAAAAFIEQLLPAKPLPQLNLKCLGATHLPEQPEWHRLIDLATGAISQGKLDKVVLARATDLAFSSPVSAAGFMAASRRVNLNCYHFLMAFDPQNAFLGSSPERLWRRIDDALRTEALAGTVANHPDDMQAEKLGQWLLKDDKNQRENMLVVEDICQRLQGTVGALDVLPPQVMRLRKVQHLRRCIWTLLKRQDDALCLKQLQPTAAVAGLPRELARAFIAAHEPFEREWYAGSAGYLSRHQTEFCVALRSARVSGSAVRLYAGAGIVAGSVASEEWQEIENKAAGLKTLLIDGGN

SEQ ID NO: 93611 - protein, 433 aa, Cedecea lapagei
  misc_feature (1)..(433): tr|A0A3S4ILM0|A0A3S4ILM0_9ENTR Isochorismate synthase M enF OS=Cedecea lapagei OX=158823 GN=menF PE=3 SV=1
MNSVAVALQQMQQELAGEFADAPGLQRLCVPVTLSDASDPLAWLTAQSLYPQFYWQQRSGNEEVAALGALLSFTALEEAQVFLQSHPEQPLLRVWGLNAFDPAHGFLFLSRLEWRRVGGEAFLWLHLYSETSLKQDALAAAAFIKQLLPAKLLPQLNLKCRSETHLPEQPEWHRLVDQVVTAIGQNELDKVVLARATDLTFTSPVSAAGFMAASRRVNLNCYHFLMAFDAQNAFLGSSPERLWRRVDDALRTEALAGTVANHADDAQAAKLGQWLLKDDKNQRENMLVVEDICLRLRDDVGALDVLPPQVVRLRKVQHLRRCIWTQLKRQDDALCLKQLQPTAAVAGLPRELARAFISANEPFEREWYAGSAGYLSRHQTEFCVALRSAQVSRSEVRLYAGAGIVAGSVAADEWQEIENKAAGLKTLLVGGGN

SEQ ID NO: 93612 - protein, 433 aa, Cedecea neteri
  misc_feature (1)..(433): tr|A0A089RJV1|A0A089RJV1_9ENTR Isochorismate synthase M enF OS=Cedecea neteri OX=158822 GN=menF PE=3 SV=1
MNSVAVALQQMQQELAGEFADAPGLQRLCVPVTLSDASDPLAWLTAQSLYPQFYWQQRSGNEEVAALGALLSFSALEEAQTFLQSHPEQPFLRVWGLNAFDPAHGFLFLSRVEWRRVGGEAYLWLHLYSETSLKQDALAAAAFIEQLLPAKLLPQLNLKCLGETHLPEQPEWHRLVDQVVSAISQDELDKVVLARATDLAFSSPVSAAGFMAASRRVNLNCYHFLMAFDAKNAFLGSSPERLWRRIDDALRTEALAGTVANHADDAQAAKLGHWLLKDDKNQRENMLVVEDICQRLRDAVGALDVLPPQVMRLRKVQHLRRCVWTQLKRQDDALCLHQLQPTAAVAGLPRELARAFIAANEPFEREWYAGSAGYLSRHQTEFCVALRSAKVSHTGVRLYAGAGIVAGSVAAEEWQEIENKAAGLKTLLVGGGN

SEQ ID NO: 93613 - protein, 433 aa, Cedecea sp.
  misc_feature (1)..(433): tr|A0A1X7I1L6|A0A1X7I1L6_9ENTR Isochorismate synthase M enF OS=Cedecea sp. NFIX57 OX=1566286 GN=menF PE=3 SV=1
MNSVAVALQQMQQELAGEFADKPGLQRLCVPVTLSDASDPLAWLTAQSRYPQFYWQQRNGNEEVAALGALLRFSALEDAQTFLQSHPEQPFLRVWGLNAFDPSHGFLFLSRLEWRRVGGEAFLWLHLYSETSLKQDAIAAAAFIEQLLPAKLLPQLNLKCLGETHLPEQPEWHRLVDQVVSAISQKALDKVVLARATDLAFSSPVSAAGFMAASRRINLNCYHFLMAFDARNAFLGSSPERLWRRIDDALRTEALAGTVANHPDDAQAAKLGQWLLKDDKNQRENMLVVEDICQRLQAAVGALDVLPPQVMRLRKVQHLRRCIWTQLKRQDDALCLKQLQPTAAVAGLPRELAREFIAENEPFEREWYAGSAGYLSRHQTEFCVALRSAKVRHTGVRLYAGAGIVAGSVAAEEWQEIENKAAGLKTLLIGSDN

SEQ ID NO: 93614 - protein, 348 aa, Cellulomonas rhizosphaerae
  misc_feature (1)..(348): tr|A0A413RP13|A0A413RP13_9CELL Isochorismate synthase ( Fragment) OS=Cellulomonas rhizosphaerae OX=2293719 GN=D 1825_05030 PE=4 SV=1
EVKLPGTGPVAFGSFAFDEHSPVGGVVVVPRVVVGRRGGRTWLTTVTTGAQLGSAPALADVVGPRVPPHDPGEVVYADEHAADWQDVVAHGIAAVRAGEVDKVVLARDVEARTQRPLDARWVLDRLAAQYPSCWTFSVDGMLGATPELLVRSEKGLVTSRVLAGTIRRTGDDAADVARAAILAHSSKDLEEHEYAVTSVAHALEPFCSSTNVPDVPFVLHLPNVLHLASDVTGVLAGTDGDHPTSLALAAALHPTAAVCGTPTQAARELIARVEGMDRGRYAGPVGWFGADGDGEWGIALRSAQVDPDDARRVRLFAGCGIVAASDPAAELAESEAKLVPMRYALSRD

SEQ ID NO: 93615 - protein, 441 aa, Cellulomonas sp.
  misc_feature (1)..(441): tr|A0A4Q5MWE2|A0A4Q5MWE2_9CELL Isochorismate synthase O S=Cellulomonas sp. HLT2-17 OX=1259133 GN=EUA98_16625 PE =4 SV=1
MSTLQTQDADAVPQPLVVRTVAIDDPGTLLDLLPVDAPLAWVRRGDGLVGWGEVLRFEVTGPDRFRAAESRWHDALAHAVVRDEVDLPGTGPVAFASFAFDEGSPAGGVVIVPRVVVGRRGATTWMTTIDLGARIGTVPSLDAAVRDRTPVAAPGAVTFTDGAVPADRWPDVIARGVAAIRAGEVDKVVLARDVIAHTTHPLDPRWVLDRLGDDYPSCWTFSVDGLLGATPELLVRSEKGLVTSRVLAGTIRRTGDDHADLARAAILAHSSKDLEEHEYAVSSVADALAPFCSSTNVPDVPFVLHLPNVLHLASDVTGVLSSAHPGSDAALTGLAPSSLALAAALHPTAAVCGTPTPVARALIARLEGMERGRYAGPVGWFGADGDGEWGIALRCAEVDPDNARRIRLFAGCGIVAASDPASELAESEAKLEPMRHALASD

SEQ ID NO: 93616 - protein, 455 aa, Cellulosimicrobium cellulans
  misc_feature (1)..(455): tr|A0A516N7Q0|A0A516N7Q0_CELCE Isochorismate synthase O S=Cellulosimicrobium cellulans OX=1710 GN=FOG94_06950 P E=4 SV=1
MSAEPSATAAQPHPLVVRTTRIPDLPGGLDALVDLLPDTRPLAWVRRGDGIVGWGEALRLETWGPGRFADAEAAWHETLARAVVRDEVGLPGTGPVAFGSFAFDDSAPGDDAHDPVRAGGVLVVPRVVVGRRDGHAWLTTVDTAGSLSSSPTDALRRTPREPVRAPGAVAWHDGALGADDWAAVVAEGVERIRSGALEKVVLARDVVAHTSEPVDPRWLLARLASAYEACWTFSVDGLVGATPELLVRSEKGLVTSRVLAGTIRRGGLSDDEALLRAAQLARSSKDLEEHEYAVRSVAQALAPFCSSMNVPDSPFVLHLPNVMHLASDVTAVLARGASAPGASGGAAAGPTSLALAAALHPSAAVCGTPTVVARDLIREIEGMDRGRYAGPVGWLGADGDGEWGIALRSAELSGTDPRSVRLFAGCGIVAASDPAAEVAESEAKLEPMRYALGDA

SEQ ID NO: 93617 - protein, 454 aa, Cellulosimicrobium funkei
  misc_feature (1)..(454): tr|A0A4Y8QZF7|A0A4Y8QZF7_9MICO Isochorismate synthase O S=Cellulosimicrobium funkei OX=264251 GN=E1O70_13735 PE =4 SV=1
MSAEPSATAAQPHPLVVRTTRIPDLPGGLDALVDLLPDTRPLAWVRRGDGIVGWGEALRLETWGPGRFADAEAAWHETLARAVVRDEVGLPGTGPVAFGSFAFDDSAPGDDAHDPVRAGGVLVVPRVVVGRRDGHAWLTTVDTAGSLSSSPTDALRRTPREPVRAPGEVAWHDGALGADDWAAVVAEGVERIRSGALEKVVLARDVVAHTSEPVDPRWLLARLASAYEACWTFSVDGLVGATPELLVRSEKGLVTSRVLAGTIRRGGLSDDEALLRAAQLARSSKDLEEHEYAVRSVAQALAPFCSSMNVPDSPFVLHLPNVMHLASDVTAVLARGASAPGTSGGAAAGPTSLALAAALHPSAAVCGTPTVVARDLIREIEGMDRGRYAGPVGWLGADGDGEWGIALRSAELSGTDPRSVRLFAGCGIVAASDPAAEVAESEAKLEPMRYALGA

SEQ ID NO: 93618 - protein, 454 aa, Cellulosimicrobium terreum; identical to SEQ ID NO: 93617
  misc_feature (1)..(454): tr|A0A4R9EAI0|A0A4R9EAI0_9MICO Isochorismate synthase O S=Cellulosimicrobium terreum OX=412439 GN=EQW79_013750 PE=4 SV=1

SEQ ID NO: 93619 - protein, 459 aa, Cerasibacillus quisquiliarum
  misc_feature (1)..(459): tr|A0A511V2W2|A0A511V2W2_9BACI Isochorismate synthase M enF OS=Cerasibacillus quisquiliarum OX=227865 GN=menF P E=3 SV=1
MIDQNAVSLDKLLNSIMDQGLSHNRQLVSYTKQIQPFNPLSVLELGKEEDRFFWKRNDNCLYLVGIGNLIELVFDRVNYQKIHEEWNALVDKAIVHNPYPVPGTGLLSFGGIAFDDRREPSTLWKNFSASQFRVPKFLFIKYNDAYYLTINFIVHAHINSDLLVQNIQQKEQQLLQDLSGLPPLGTILKEEEMDIAKWLQSIENAKQTIQNHLAEKIVLARELRLKLSSTGEMSTVVKRLIETQPKSYVFAFEQGDECFLGATPERLIRLEDDQLESMCLAGTAPRGETDMADEQVRHELLNDKKNREEHDFVVQMIRRAIERYCVDIRIPDTPTVFPLKNLQHLYTPVTAQLKRDYHIFDLVEQLHPTPALGGTPKEIALAFIRKHEPLDRGWYGAPIGWVDHRNNGEFAVAIRSGLIQSNAASLFAGCGIVKDSEVEAEYEETKIKFLPMLHVLGGK

SEQ ID NO: 93620 - protein, 462 aa, Cerasibacillus sp.
  misc_feature (1)..(462): tr|A0A5C8NGS4|A0A5C8NGS4_9BACI Isochorismate synthase M enF OS=Cerasibacillus sp. CC-CFT480 OX=2498845 GN=menF PE=3 SV=1
MTDTRNLNLKEILTKAKEEGKKVNRQLVSYTRKINDFNPLAIFENGKELSQKKRMFWKRYDDQYIFVGIGNITEIVVENEGKQAIYNKWRRIVKEAIIYNPYQEAGVGLVAFGGIAFDPKKAPTPLWAKFAENEFRIPQFLFIKKKDSFYVTINMLINKDENIEECLKEYENIEKQLLGERTIHPTMGKIIDKQEINPEQWKQAIEDAKVNIQQKQTEKIVLARELRLHLSQSVDITSVLHTLIATQPNSYVFAYEQGTDCFVGATPEQLINVEGNQLQSMCVAGTAPRGRTDEEDERLNNELFHDKKNREEHDYVVQMIRQSIEPFCYKIDIPNTPTVYPLKNLQHLYTPVTAILKSGQHLFDLIDTLHPTPALGGTPKDTALAFIREHEHLDRGWYGAPIGWIDCHDNGEFAVAIRSALIQEKEASLFAGCGIVKDSDTQTEYEETKIKFLPMLSVLGGS

SEQ ID NO: 93621 - protein, 418 aa, Cesiribacter andamanensis
  misc_feature (1)..(418): tr|M7NWU9|M7NWU9_9BACT Isochorismate synthase entC OS=C esiribacter andamanensis AMV16 OX=1279009 GN=entC PE=4 SV=1
MSDTYDYKTGEALQQPIPSGQLFAAALQLAAARGYSFAAWRLPAQQQPSLLIDLSGSAAKVHPSLEELPTGFLFAPYQADLTALDAREKPGCLFLRADLLWEGQQGELRPAEGLPPQRRAQAESFLEELEQEEAPAASAYPLAPCRAGTTPKTQYIHLVEQSVAAIRRGDFQKNVCARTKEVALPAGFSLSSFFLHLSAAYPNAFVSLVAIPGVGTWIGATPEILISVDRHQKFCTVALAGTQRRQAGMRPVDAVWRQKEIEEQAMVSRYIINCLKKVRIREFEEIGPRTIAAANLLHLRTDFTIDLKEVHYPNLPTVMLELLHPTSAVCGLPKEPAAAFLETHEQLDRSFFAGFLGPVHLQQETHLFVNLRCMQLLERTALLYAGAGITADSDAEREWQETEHKCQTLLDVLYEASR

SEQ ID NO: 93622 - protein, 472 aa, Chamaesiphon minutus
  misc_feature (1)..(472): tr|K9UMG9|K9UMG9_CHAP6 Isochorismate synthase MenF OS=C hamaesiphon minutus (strain ATCC 27169 / PCC 6605) OX=1 173020 GN=menF PE=3 SV=1
MDHYLTIATQVQNFFKYDLIDLPPEMAGKILRIEVQISTLEPLSWLARQKSDVKTYWCDRQGDFTMAGVGTVATIAGDCPIDYPDIFGQLRQSLSSLFPQARYYGGIGFSQSRSISPIWELFGNYRFVVPRFEVLVRGLETFFACNLTLNAFPNLGNELWETELTMILDELARLDFTQPELPPELPLQIARLDRPNRVQWQRNIELALAKFNELNLDKIVLARRSTLTFTHNLQPQLLLRSLKPHNPHSYHFCFQIAPTTAFIGTSPERLYSRADRLLKTEAIAGTRQRGTSATIDRELGDNLRTSLKDIHEHELVVTNLRGVLTELCHSVTIDDESAILKLNKVQHLYTQCQGLLRSHLTDADILPKLHPTPAVGGFPRAPALKLIQELEPFDRGWYAAPVGWVGYDDVEFAVAIRSGAIDRDRLFLFAGAGIVRGSQSAEEWVEIENKIRHFTDLFSDLPPQQIIDLSLA

SEQ ID NO: 93623 - protein, 472 aa, Chamaesiphon polymorphus
  misc_feature (1)..(472): tr|A0A2T1GDI8|A0A2T1GDI8_9CYAN Isochorismate synthase M enF OS=Chamaesiphon polymorphus CCALA 037 OX=2107692 GN =menF PE=3 SV=1
MDHYLTIAAQVQNFFKYDLIALPPEMVGKVLRIEVQISTLEPLSWLARQKSDVKTYWCDRQGNFTMAGVGTVATIDGDRPIDYPDIFGQLRQSLSLLFPHVRYYGGIGFSQSKSISPIWESFGNYRFVVPRFEILVRGLETFFACNFTLNSLPNLGHEIWETELATILDELARIDFSQQELPTELPLQIARLDRPNRVEWQRNIELALAKFNALNLDKIVLARRSTLTFTHNLQPQLLLRSLKPHNPHSYHFCFQIDPTTAFIGTSPERLYSRADRLLKTEAIAGTRQRGTSASIDRELGDNLRTSLKDIHEHELVVTNLRGVLTELCHSVTIDDESAILKLNKVQHLYTQCQGLLKSHLTDADILPKLHPTPAVGGFPRTPALKLIQELEPFERGWYAAPVGWVGYDDVEFAVAIRSGAIDRDRLFLFAGAGIVRGSQSAEEWAEIENKIRHYTDLFTDLPPQQIIDLSLA

SEQ ID NO: 93624 - protein, 430 aa, Chania multitudinisentens
  misc_feature (1)..(430): tr|W0L8Y5|W0L8Y5_9GAMM Isochorismate synthase MenF OS=C hania multitudinisentens RB-25 OX=1441930 GN=menF PE=3 SV=1
MEQFSGLLRQLRQQLEQVFPTEAGWRQIILPVPERLATMLLEWLAAQAVFPQFYWRQREGQQEAAVCGALRQFTHPAQAQAFLYAYPAARLWGLNAFDNRALLFLPRMEILNYSGKGELTLNLFSEHSLDEDVVAASRWLDELVAAKPLAEMQTTVASVLHQPERSEWENQLRDVLQAIEKRQLEKVVLARRTLLTLSSPLFAPALMAASRKVNHRCYHFMMRFNAHSAFLGSSPERLYRREGRHLLTEALAGTVANHTDGQQARALAQWLLHDVKNQQENLLVVDDICQRLQGGANAVDVLPPEVVRLRKVQHLRRRIEGQLNHGDDADCLQRLQPTAAVAGLPRQAARDFIQQHEPFSRGWYAGSAGYLAVAQSEFCVALRSTQIDGAQVQLYAGAGIVAGSDPAEEWQEIENKAAGLRTLLQPENKL

SEQ ID NO: 93625 - protein, 468 aa, Chlorobaculum limnaeum
  misc_feature (1)..(468): tr|A0A1D8D1Y7|A0A1D8D1Y7_CHLLM Isochorismate synthase M enF OS=Chlorobaculum limnaeum OX=274537 GN=menF PE=3 SV =1
MPADDSILMMQKALQLLEESVKAAIRHKDGPSARSGQPVLERFSAPLGEVDATRWLSAQSLFPKLFWMNREKSEWIAGIGESDRIEISETGPNDRSFLVLDEAMQRKNPQARYIGGFCFNNLQKQNRLWSAFSPGLFILPLVSVEYRDGQASISCSLWLKPGDDRQKALEQLLLTLSELSAGDTPEAAPIPEMTRVDYCPDKAQWIENCETILRNFDEGKLDKVILARQTELSFAGKVPAIRFLLDYPFPENTAYRFYFEPVEGHAFVSFTPERLYRRDGDMLETEALAGTVTKEALKADDIAASELLLNSEKDIREHRFVKDTIYQELQPVCSHIDMQEEVGVLQLNRLAHLLARCKARLLPEFSNDSTVLRQLHPTPAVGGVPREKAMSLILSIEPFCRGWYAAPVGWLSHDAAEFAVGIRSALVNDDKVYLYSGAGLVRGSNPESEWEEVDQKIGDILAITQQTS

SEQ ID NO: 93626 - protein, 469 aa, Chlorobaculum parvum
  misc_feature (1)..(469): tr|B3QL01|B3QL01_CHLP8 Isochorismate synthase MenF OS=C hlorobaculum parvum (strain NCIB 8327) OX=517417 GN=men F PE=3 SV=1
MPADDSTLMLQKALQLLEESVKAAIAQPQPPHNDNGRPVLESFTTSIDGSVDGPAWLAERQQFPKLFWMNREKSEWIAGIGEADRIEITETGPNERSFTLLEEALKLKNPHARYVGGFCFNNRQQQDHIWHGFSSALFILPLISLEHRDGKTSMTCSVWLKPEDDRKQALEQLLQTLASLRSEQAVKTPAIPGRTRTAYSPDRAQWIERCETILRKFDEGGLDKVILARQTELSFSGKVPAIRFLLDYPYPENAAYRFYFEPIEGHAFVSFTPERLYRRDGDLLQTEALAGTVTKEKVKADDHTASKLLLASEKDVREHRFVKDTIYRELQPVCSEIDMQEEVGVLQLNRLAHLYARCRARLRPEFRNDSTVLRQLHPTPAVGGVPREEAMELILSVEPFCRGWYAAPVGWLSRDAAEFAVGIRSALIFEDKVYLYSGAGLVRGSDPESEWEEVDQKIGDILAITRQGR

SEQ ID NO: 93627 - protein, 485 aa, Chlorobaculum sp.
  misc_feature (1)..(485): tr|A0A4V1M9S8|A0A4V1M9S8_9CHLB Isochorismate synthase M enF OS=Chlorobaculum sp. 24CR OX=2508878 GN=menF PE=3 S V=1
MNGTCRTMCLTRPENESRNPMPADDSILMMQKALQLLEESVKTAMQQPSAGNGRPVLERFSAPLDEIDATRWLSAQRLFPKLFWMNREKSEWIAGIGEADRIEISETGPNDRSFLVLDEAMKQKNPHARYFGGFCFNNLQKQNKLWSAFSPGLFILPLVSIEQRDGQTAMACSLWLKPGDNRQQALENLLLALSKVSAGEPPAAAAIPEMTQVCYCPDKPHWVESCETILRNFDEGKLDKVILARQTELSFAGKVPAIRFLLDYPFPDNSTYRFYFEPVEGHAFISFTPERLYRRDGDMLETEALAGTITKEVLKADDSAASELLLASEKDVREHRFVKDTIYRELQPVCSDIDMQEKVGVLQLNRLAHLYARCRARLKPEFRNDSTVLRQLHPTPAVGGVPREEAMTLILSAEPFCRGWYAAPVGWLSQDAAEFAVGIRSALVNDDRVYLYSGAGLVKGSDPESEWEEVDQKIGDILAIMQQTT

SEQ ID NO: 93628 - protein, 488 aa, Chlorobaculum tepidum
  misc_feature (1)..(488): tr|Q8KBE9|Q8KBE9_CHLTE Isochorismate synthase MenF OS=C hlorobaculum tepidum (strain ATCC 49652 / DSM 12025 / N BRC 103806 / TLS) OX=194439 GN=menF PE=3 SV=1
MSGTCKTMCLTRPENEPRNPMQADDSIPMMQKALQLLEASVKAAMRQRDGSPAVSGQPMLERFSAPLGEVDATRWLSAQRLFPRLFWMNREKSEWIAGIGEADRIEITESGPNDRSFLVLEEAMTRKNPHARYIGGFCFNNLQKQNKLWSAFSPGLFILPLVSIEYRDGQTLMTCSLWLEPGNDRQKGLEQLLAALSAVSAGDAPETAGIPEMTQVSYCPDKAQWIENCETILRNFDEGKLDKVILARQTELSFAGKVPAIRFLLDYPFPENTAYRFYFEPVEGHAFISFTPERLYRRDGDMLETEALAGTVTKEALKADDSIASELLLNSEKDIREHRFVKDTIYRELQPVCSDIDMQEKVGVLQLNRLAHLLAKCKARLLPEFSNDSTVLRQLHPTPAVGGVPREKAMSLILSIEPFCRGWYAAPVGWLNRDAAEFAVGIRSALVNDDRVYLYSGAGLVRGSNPESEWEEVDQKIGDILAITQQTS

SEQ ID NO: 93629 - protein, 488 aa, Chlorobaculum thiosulfatiphilum
  misc_feature (1)..(488): tr|A0A5C4S6B8|A0A5C4S6B8_CHLTI Isochorismate synthase M enF OS=Chlorobaculum thiosulfatiphilum OX=115852 GN=men F PE=3 SV=1
MRGTCRTMCLTRPENEPRNPVPADDSFFMMQKALQLLEESVKAAMRQRDGSPAVSGQPVLERFTAPLGEVDATRWLSAQRLFPRLFWMNREKSEWIAGIGEADRIEISETGPNDRSFLVLDEAMQRKNPHARYIGGFCFNNLQKQNDLWKAFSPGLFILPLVSVEYRDGQASMSCSMWLKPGDDRQKALEQLLLTLSEVSAGDAPEAPAIPEVTQVAYCPDKTRWIENCETILRNFDEGKLDKVILARQTELSFAGKVPAIRFLLDYPFPENTAYRFYFEPAEGHAFVSFTPERLYRRDGDMLETEALAGTVTKEALKADDSAASELLLNSEKDIREHRFVKDTIYRELQPVCSDIDMQEQVGVLQLNRLAHLLARCKARLLPEFSNDSTVLRQLHPTPAVGGVPREKAMSLILSIEPFCRGWYAAPVGWLSRDAAEFAVGIRSALVNDDKVYLYSGAGLVRGSNPESEWEEVDQKIGDIMAITQQTS

SEQ ID NO: 93630 - protein, 482 aa, Chlorobium chlorochromatii
  misc_feature (1)..(482): tr|Q3APX3|Q3APX3_CHLCH Isochorismate synthase MenF OS=C hlorobium chlorochromatii (strain CaD3) OX=340177 GN=me nF PE=3 SV=1
MPTTTPNDESHIHLTTREQLPLAIALEHLKDSVKAIRRSLPYHKAQKAQVITCVEAIEPIEPLHWLYVQQLYPRLYWKNREQNNEVAAVGIADSFTAKDDDNNNSAFAAFQAACDERSPALRYFGGFRFNGAELSEEHWKHFPPFFFFLPLVTVERFADQRYTVSANLFLAVGDSVDEKINQLIAFIEQLNSRIDNESVLNTLLPSVEHITRTPNKAAWNAGCEKALNAFENGELEKIMLARQTTLRFTHTFSPLLFLLRYPYPHNAIYRFYLELAPNQAFFSFTPERLFRRHESMVETEALAGTCSKELLQATDQHASQTLLGSEKDVREHNYVREMIYQELLPICSSIDMEDEVQVLQLQRLAHLYTRCSATLKEKSIPTSDILKQLHPTPAVGGVPKEEILEHIRALEPFTRGWYAAPVGWVDSHHAEFAVAIRSGLVNGNEVHLYSGAGLVKGSNPDAEWEEIEQKIGDLLSITRMKQ

SEQ ID NO: 93631 - protein, 474 aa, Chlorobium ferrooxidans
  misc_feature (1)..(474): tr|Q0YUD5|Q0YUD5_9CHLB Isochorismate synthase MenF OS=C hlorobium ferrooxidans DSM 13031 OX=377431 GN=menF PE=3 SV=1
MMSEHYHTITPSAELLSIEKAVASLKTALSLYDDKLDAGRDHKNHLVTFSQPVLPADLPVWLSVQTIYPRVFWMNREKDYAVAGIGIADTITYDGEGNNDEMFRQFERSIARTTPQARYFGGFHFNNSERQDPIWKEFSSFSFVLPLVQLTFENEHYSLSCHLWLEQGDDVITKIRELTEVLDRVVTNTDCSASKLPELLNISYNPDETRWIELCRKALRTFTSGEMEKIMLARQTILEFSTTLSPLLFLLRYPYPENAIYRFYFEPAENRAFFSFSPERLYRRKGNQLLTEALAGTCSKEMIKGGDHHASEALLNSEKDIREHNFVRAMIYEDLFPICREIDMEEDVCVMQLNRLAHLYTRCSATLKPEFENDSDVLKRLHPTPAVGGVPKEPALQHIMELEPFSRGWYAAPVGWISRDAAEFSVAIRSALVNGRFTYLYSGAGLVTGSDPLSEWNEVDQKIGDILTITRQEA

SEQ ID NO: 93632 - protein, 473 aa, Chlorobium limicola
  misc_feature (1)..(473): tr|B3EG67|B3EG67_CHLL2 Isochorismate synthase MenF OS=C hlorobium limicola (strain DSM 245 / NBRC 103803 / 6330 ) OX=290315 GN=menF PE=3 SV=1
MLMREQQNIIIPEQEPLPIDRAVAALRKAIQAYDPSAVNRSPALSIFRQRVLPADPLIWLFRQRVFPRVFWMNREKDCTLAGIGSADWIRHEAEGSNSDSFDLLVRTLSEKDPAVRYIGGFRFNNMESQDETWSAFPSFSFVLPLVLYAEERDGSWLSCHLFVKEGEDSGRKKTVLLQTLEALDLKADAAIPEMPLLKQASCIPDRKLWVEGCRKALGLFASGEMDKIMLARRTVLEFGSSFSPLLYLIRYPYPRNATFRFCYEPMENHAFISFTPERLYRRDGQMILTEALAGTCLKESMNGNDFHASEILLNSEKDIREHGFVKEAIFRALQPVSSSFEMEQNLRVLQLNRLAHLYTCCKATLKPEYSSDSTVLSVLHPTPAVGGVPKNEAMQHILDLEPFCRGWYAAPVGWISRDSAEFAVGIRSALVSEEFTNLYSGAGLVEGSDPDLEWDEIEQKIGDLMAIARGSHE

SEQ ID NO: 93633 - protein, 471 aa, Chlorobium phaeobacteroides
  misc_feature (1)..(471): tr|B3EMZ4|B3EMZ4_CHLPB Isochorismate synthase MenF OS=C hlorobium phaeobacteroides (strain BS1) OX=331678 GN=me nF PE=3 SV=1
MDKPTDIFEHVSAPLPMKKAVSELRKKVLHHAASAESASEPHLHTFSVPVSISDPLLWLHGQDTYPKFFWSNREKNDIIAGTGLADRIDYDRTGTNSASFDKLQKAVSEKDPEARYFGGFCFNNEQKQDEQWKAFKSFTFILPLIQLSVINGKPALTCHLILDPEENTTEKYTLLLDAIDAINTSDAPDNTGIPEILSLSFSPDQKQWMETCELVLERFRKGLIGKIILARQTLLEFDHSFSPLLFLLRYPFPESSTYRFYFEPEKNTAFFSFSPERLYRRDCDLLLTEALAGTCSRETMDNGSEEACKQLLNSEKDIREHKFVKDAIARELKPICNVIDMEESVRALQLNRLVHLYTQCSASLKPEKNNDAAVLKTLHPTPAVGGVPKDEALEQIIRLEPFSRGWYAGPVGWISRNSAEFAVGIRSAVGSGNKVYLYSGAGLVKGSDPASEWEEVDHKIADILAITRQNV

SEQ ID NO: 93634 - protein, 474 aa, Chlorobium phaeovibrioides
  misc_feature (1)..(474): tr|A4SD61|A4SD61_CHLPM Isochorismate synthase MenF OS=C hlorobium phaeovibrioides (strain DSM 265 / 1930) OX=29 0318 GN=menF PE=3 SV=1
MHEKHHIIIPFPNPLPVEQAVQALKASLLEYTTLTADTPVEKPGTLAVFRQNIPALDPLKWLSAQSLFPRIFWMNRERDDMTAAIGAADTITHEEAASNEENFRRLGTAMAGKSPHARYFGGFRFNSSETGDPAWEAFPPLSFTLPLLQLSREGSLHTLTCNLWITAADGTKAAVHRAIKALDQLQSAPTQSDDELPSLLSVTHNPTRDGWINACETALNAFASGSMQKIMLARQTVLEFTEAFCPLLFLQNYPYPENTTYRFYFEPSPGQAFFSFTPERLYRRSGRSLVTEALAGTHSKKSEEQEDSYARDALLNSEKDIREHRFVRDMIYDELRPACSSVDMEEEVRVLQLNRLAHLYNLCRAELKEEFSNEPAVLSLMHPTPAVGGVPKKEAMRRIPDLESFSRGWYAAPAGWVSSNSAEFCVGIRSALVNGRTAYLYSGAGLVKGSDPAAEWDEVEQKIGDLMSITRQKA

SEQ ID NO: 93635 - protein, 470 aa, Chlorobium sp.
  misc_feature (1)..(470): tr|A0A4R0QWD0|A0A4R0QWD0_9CHLB Isochorismate synthase M enF OS=Chlorobium sp. N1 OX=2491138 GN=menF PE=3 SV=1
MSDQHIITPQDTPLPIVQAAEAIDSALQALDAVGAGRPTGTLVEFRQKVEPIDPMRWLARQKAWPKIFWRSRERDFTAAGLGSADTVSFAGREPNASVFRRLGETMGTKKHDARYFGGIAFNSLEAEREEWKRFPAFSFILPLVELTEENGEQSLCCRIVPGTREETAERAAEARRILSALKGPLTDEAAGIPAVRSRSCSPDREGWIRNCQRAIETFEEGSTEKIMLARRTTLEFAAPFDPMLILLRHPYPKNATYRFYFEPEEGCAFLSFTPERLYRRDGRRLLTEALAGTCSKENAELSDECASRALLASEKDLREHRFVKDMIESELQPACRRIEMEDDVQVLQLNRLAHLYARCTAELKPECAGDGQVLSILHPTPAVGGVPKEEAMRRILEFEPFARGWYAGPVGWISRDSSELAVGIRSALVQSATACLYSGAGLVRGSDPELEWAEVEQKIGDLVAITGATP

SEQ ID NO: 93636 - protein, 437 aa, Chloroflexi bacterium
  misc_feature (1)..(437): tr|A0A358QPG1|A0A358QPG1_9CHLR Isochorismate synthase O S=Chloroflexi bacterium OX=2026724 GN=DEG26_10845 PE=4 SV=1
MTAASPGAILPRRAGDPGADLDLLASWRSGGFLMEREGTGVVTLGELRRIEVPAGRGQASRAASLADAALADLHVDGAVIAAALPFAGDAPAHLLVPERVRVTSIAPRELDLAARDGRQAAAFAPSRSAAQAAAERGAHRAPPSTSARIEPMRWRAHPPLDAYAGAVAEAISRIRAGRLEKVVLARSLVASNPGMETRALLAELRRRDPGCHLFAAPAFAAGEIGDFVGATPETLIRREGDRVLSLPHAGTAARSPDPARDRQVAEALLLSAKNRHEHAAVVEAVADALQPHCAELRVDPEPHLAATATVWHLATAVRGRLRPSAPGALSLAAALHPTPAVCGTPTAAAAELIAELEPGSRGLYAGLVGWVDSRGDGEWAVSLRCALVTRAAVRIHAGAGIVAESQPDLEVAETEVKFRTLIDALEACPPAAGGAPE

SEQ ID NO: 93637 - protein, 478 aa, Chloroherpeton thalassium
  misc_feature (1)..(478): tr|B3QUU3|B3QUU3_CHLT3 Isochorismate synthase MenF OS=C hloroherpeton thalassium (strain ATCC 35110 / GB-78) OX =517418 GN=menF PE=3 SV=1
MIECKTEQHIKICGKEIATVQNAARTIQQLIDENIPELTETIAQPTLVSFQISLENCDPLSWLSQQASTTRLYWSDREASYEVAAAGETDRLFAEGEPHLTELILELQRRLASSSEDIRYYGGLKFDSSSPADHDWKPFGALLFVLPRYEMTKSQHGNTFTINLVIQHGNEVEQQLLAEIQTLQTLCSAAPVSSQPLPIASIRTDSPNQKEWQEIIDKSIQAFDSGCMEKIVLARKTTMVFSEELDPIRLLKQLKDVVNRAFHFYFQFDGTPGFIGATPERLYKRIGETIFSEAVAGTRPRGNSPEADLAFAEDLLNSDKDVREHQFVCKSILDVMDELCTDIQSPAQVSLLKLARVQHLYNKYSATLKKGYGDADLLERIHPTPAVGGVPKKEAIRQIAALEPFDRGWYAGPIGWLSRNESEFAVGIRSALMMKNQLHIYTGAGIVKGSEAESEWEEIENKLGSFLAIQQVNGTENA

SEQ ID NO: 93638 - protein, 394 aa, Chromobacterium sp.
  misc_feature (1)..(394): tr|A0A0J6RA27|A0A0J6RA27_9NEIS Isochorismate synthase O S=Chromobacterium sp. LK11 OX=1628212 GN=VK98_18625 PE= 4 SV=1
MNQTSLDPAYSGEHNLLAAYQADSAFFFASPCHTLLAEGIQRVITDADPSAAIAAALASQPDPEQAVVVGAIPFMPEQQPWLFVPQQVRRADALKQEQRSALRQPLQAECRLTPQPAPAAYCQGVSDALARIGSGALDKVVLSRTLELSAEQAIDQRQLLLNLASQNQHGYTFAVQLSEDGAPRRALMGASPELLLARYGHQVITNPLAGSAARSPDPAEDRRRADALLESGKDLYEHKLVIDAVVEALAPYCRDLQVPAGPSLVSTATMWHLSTRISGELIDPAVSSFELARALHPTPAVCGFPADPARSLIREIEPFDRGFFTGMVGWCDGKGDGEWAVTIRCAEIAERTLRLFAGAGIVTGSLPESELAETAAKFRTMLRAMGLADLAEAA

SEQ ID NO: 93639 - protein, 392 aa, Chromobacterium violaceum
  misc_feature (1)..(392): tr|Q7NXZ1|Q7NXZ1_CHRVO Isochorismate synthase EntC / Me nF OS=Chromobacterium violaceum (strain ATCC 12472 / DS M 30191 / JCM 1249 / NBRC 12614 / NCIMB 9131 / NCTC 975 7) OX=243365 GN=entC PE=4 SV=1
MHTASALTGNAEDGEFYFMSSHRSLKAGGVHSRIRTPARGALDPRSAFSLEVAEAFARARAGGIESPVLMGAIPFDIDQPSELFIPARHAFFDRGERLLAAAQRAGDGGKVVSARSIPDEQGFKAAVSQAIEQFGRGEIRKAVLSRVLEVDFERPVSAERVFDAVCAQNPNGYQFQLPLADGGHLVGVSPELLLQKDGARVRTFPLAGSAKRQGDPAADAAASAKLLDSAKDHYEHSLVIDDIRDVLAPYCSRLDIPAAPTLLATRAMWHLGSPIDGVLSDPSLPILQLACRLHPTPAICGFPTQASRQLIREIEPFERGVFSGIVGWCDEHGNGEWAVTIRCATVAQRRVRLFAGAGIVAASTPEAEWAETQAKLGTMLGAFGLSGQEAVA

SEQ ID NO: 93640 - protein, 295 aa, Chroococcales cyanobacterium
  misc_feature (1)..(295): tr|A0A3N5INR5|A0A3N5INR5_9CHRO Isochorismate synthase ( Fragment) OS=Chroococcales cyanobacterium metabat2.561 OX=2485785 GN=EHM73_09475 PE=4 SV=1
EETINNLKIIQYNSSNCRQNTHQDPCSYYIHPTYNFQAAVGDALQSIQAQKFSKIVLAHALDVISPRPFHLVNCLDNLRQRHPDCYTFSLGNGRGDHFIGASPERLLTVHQGQLITDALAGSAPRGENAIEDALLANKLLASEKEQREHRAVSDFINQKLRQIGLNPQNSPSRLLKLSNIQHLWTPIHAKLKPSIHPLEIVAQLHPTPAVAGVPTEIALAQIRHYETFDRSLYAAPLGWIDCQNNSEFIVGIRSALIKGDRARLYAGAGIVAGSDPEKELAEIQLKFQALLKALT

SEQ ID NO: 93641 - protein, 469 aa, Chroococcidiopsis thermalis
  misc_feature (1)..(469): tr|K9U4C6|K9U4C6_CHRTP Isochorismate synthase OS=Chrooc occidiopsis thermalis (strain PCC 7203) OX=251229 GN=Ch ro_4084 PE=4 SV=1
MLLLPRPANYHLNCQKLYQFLVASQKNCDRNCSQIVSISLEIDSIDPLALLEKLARPHQLNFYFENKSKGEAIAAIDAVAQLQLAGANRFHLTQKFIRSCLKETDIFDSSNHTFAKPYFFCSFSFFSEATADYPFPVATVFLPRWQIARQGDRCVLVANLSIEADTNIDVFIQQLWRKIHEITSIEQPENEGNHFQREFSQVDVSSIDRFKQAVIDCSELIYEQQLSKVVLAHAIDVQANTNFNLFKCLNRLRQMHPDCYVFSTHNGKGQNFIGASPERLISIRDRQLFTDALAGSISRGKTTAEDTVLANQLLQSEKERHEHRVVIDFITQSLQELGIAPQLLSPRLRRLANIQHLWTPIQAKVPIDVHPLEIVAALHPTPAVGGVSRQLACKKIRTYEKFERGLYAAPLGWVNHQGDSEFIVGIRSALIDGDRARLYAGAGIVAGSNPDREIAEVRLKLQALLKALI

SEQ ID NO: 93642 - protein, 323 aa, Chryseobacterium antarcticum
  misc_feature (1)..(323): tr|A0A448NV49|A0A448NV49_9FLAO Isochorismate synthase e ntC OS=Chryseobacterium antarcticum OX=266748 GN=entC P E=4 SV=1
MLYFRFPFSDEIFTTDDSSAQNAVSFVSFDGLNELNFKGEIKEVPRDTFLAQGNSMKTTASKLCVFRPETKKDYEQKINKVINFVKNENLSKLVISRRKLVSYEGSKPNFSKTFLNLCEAYPNAFVYFFTKNNQSWMGAFSEVLGSFNKKTLEFETMSLAGTTQIDETWTRKELAEQRHVTDYISNILKDYSVDVTKSETYDHPSGNIKHLRTDFKAKIKSQDLEKIIAELHPTPAVCGFPKKFCQQAIAKFEEHRRSFYAGYIKVETAETIQYFVNLRCAEFFQNVALIYVGGGITAESSSEKEWQETELKAEAILKNLSFF

SEQ ID NO: 93643 - protein, 322 aa, Chryseobacterium gleum
  misc_feature (1)..(322): tr|A0A3S4M0D4|A0A3S4M0D4_9FLAO Menaquinone-specific iso chorismate synthase OS=Chryseobacterium gleum OX=250 GN =menF PE=4 SV=1
MIYFKLPFDERLLTTDEKNTKNAVHFFSYNGQDQISFSGDIIEAETSEFSLIPITNEDLIKDLTNSTAETKEEYCATLQEVIKVIKENNLPKLVYSRRKIFTDFTVIDYKESFKNLCDSYPNAFRYLFNNGQNAWMGAFSEVLGKFNKTTNEFETMALAGTLPVSEEWSEKEIEEQKPVTTYIQNILKNYSNNVQQSETYDHISGNIKHLRTDFKTSIKPEDLDSIIRDLHPTPAVCGIPKDFCNENIRKYEKFPREFYAGYIKVETEESIFYFVNLRCARLYKDAVHIFVGGGITAQSNPEKEWRETELKSEAILKNLVIL

SEQ ID NO: 93644 - protein, 332 aa, Chryseobacterium indologenes
  misc_feature (1)..(332): tr|A0A4U8VPD9|A0A4U8VPD9_9FLAO Isochorismate synthase e ntC OS=Chryseobacterium indologenes OX=253 GN=entC PE=4 SV=1
MIFKTYPKPMIYFKLPFDERLYSADEKNNKNTIDFYSYDSLNQINFNGNKIEVSSEDFDQISISNGSFPEDNTGFIAETDEEYYQNLQQVIRVIKENDLPKLVYSRRKIFTDFNTIDYKKSFTNLCASYPNAFRYIFHEGQNAWMGAFSEVLGKFNKTTHEFETMALAGTLPVSEEWSEKEIEEQKPVSTYIRGILKQYSGEIEQSGTYDHISGNIKHLRTDFKTHIKPGDLDALIRDLHPTPAVCGIPKDFCNENIRKYEKFPRELYAGYIKVETEESILYFVNLRCARLYKDAVHIFVGGGITDQSQPQKEWTETELKAEAILKNLVIDK

SEQ ID NO: 93645 - protein, 324 aa, Chryseobacterium indoltheticum
  misc_feature (1)..(324): tr|A0A381F9H0|A0A381F9H0_9FLAO Menaquinone-specific iso chorismate synthase OS=Chryseobacterium indoltheticum O X=254 GN=menF PE=4 SV=1
MIYFKFPFDEQLYSTDENSNTNSINFHSFNNAERIDIAGKIIKKNITEFENLKITSEILPKDESQFIAETQEEYLQKLEEVIQIIKENDLPKLVLSRRKILTGFTEINLKESFNNLCRNYPNAFKYLFFDGETSWMGAFSEVLGKFNKSTHEFETMSIAGTIPVSEEWTEKEIEEQKPVSSYIRNTLTKYATLSEVQESETYDHISGNIKHLKTDFKIKINPEDLDSIIKELHPTPAVCGIPKDFCREIIEKVEKFPRELYAGYIKIETEDYIQYFVNLRCARLYKNSVHLFVGGGITAQSNPKKEWQETELKSQAVLKNLVVI

SEQ ID NO: 93646 - protein, 322 aa, Chryseobacterium jejuense
  misc_feature (1)..(322): tr|A0A2X2VC21|A0A2X2VC21_9FLAO Menaquinone-specific iso chorismate synthase OS=Chryseobacterium jejuense OX=445 960 GN=menF PE=4 SV=1
MIYFKLPFNEGLHTVEETADKNAVNFHSYNSLNQINFNGNIIKVESANWNEVSITNESLANDTTDFTAETKEEYCSTLEQVIEVIKENDLPKLVYSRRKIFTDFNTIDFKASFDNLCTTYPNAFRYLFNDGENAWMGAFSEVLGKFNKATHEFETMALAGTLPTTEEWTEKEIEEQKPVTTYIQNILKNYSDQVQQSETHDHVSGNIKHLRTDFKTTIKPSDLDRLIQDLHPTPAVCGIPKDFCNENIRKYEKFPREFYAGYIKVETDENILYFVNLRCARLYRNAVHVFVGGGITAQSNPEKEWIETELKSEAILKNLVVS

SEQ ID NO: 93647 - protein, 322 aa, Chryseobacterium nakagawai
  misc_feature (1)..(322): tr|A0A448LKZ2|A0A448LKZ2_9FLAO Menaquinone-specific iso chorismate synthase OS=Chryseobacterium nakagawai OX=12 41982 GN=menF PE=4 SV=1
MIYFKLPFNEGLHTVEETTDKNAVNFYSYNNLNQINFNGNIIKVDASKFNNITITNESLVKDTTAFTAETKEEYCNTLQQVIEVIKENDLPKLVYARRKIFTDFNTIDYKASFDKLCQSYPNAFRYLFNDGENAWMGAFSEVLGKFNKITHEFETMALAGTLPTSEGWTEKEIDEQKPVTTYIQNILKNYSDNIQQSETYDHISGNIKHLRTDFKTIIKPNDLDSLIKDLHPTPAVCGIPKDFCNENIRKYEKFPREFYAGYIKVETEESVLYFVNLRCARLYKGSVHIFVGGGITAQSNPEKEWTETELKSEAILKNLVVS

SEQ ID NO: 93648 - protein, 321 aa, Chryseobacterium shigense
  misc_feature (1)..(321): tr|A0A376DQM6|A0A376DQM6_9FLAO Isochorismate synthase e ntC OS=Chryseobacterium shigense OX=297244 GN=entC PE=4 SV=1
MIYFKLPFNETLYSTDQKQGSESISFHSFALLRQIGFEGNITEASEPFEPKEMTSEVLLKDESHFTEETKEEYTNTLQQVIDVIKNHDLPKLVYSRRKIFRDFNGIDYKESFKKLCITYPNAFRYIFNDGENAWMGAFSETLGKFNKTTHEFETMSLAGTLPVSEEWTEKEIEEQKPVTSYIKDILENYSANLQLSETYDHISGNIKHLRTDFKAHIRPEDLDNLIHELHPTPAVCGIPKDFCKKSIQQFEKFPRELYAGYIKVETDEWVMYFVNLRCARLYKDSVHIFVGGGITAQSDAEKEWRETELKSEAVLKNLVVS

SEQ ID NO: 93649 - protein, 326 aa, Chryseobacterium sp.
  misc_feature (1)..(326): tr|A0A1A7KCU1|A0A1A7KCU1_9FLAO Menaquinone-specific iso chorismate synthase OS=Chryseobacterium sp. MOF25P OX=1 664318 GN=menF PE=4 SV=1
MIYFKFPFDEKLYSTDENSNTNSINFHSFNNAEKIDIAGKIIEKNLTEFENLKITSEILPKDESQFIAETQEEYLQKLEEVIQIIKENDLPKLVLSRRKILKDFNKIDLKNSFNNLCKNYSNAFKYLFFDGETSWMGAFSEVLGKYNKSTHEFETMSIAGTIPVSEEWTEKEIEEQKPVSSYIRNILEKYRDSHSIQESETYDHISGNIKHLKTDFKIKINPENLDSIIQELHPTPAVCGIPKDFCREIIEKVEKFPRELYAGYIKIETEDYIQYFVNLRCARLYKNSVHLFVGGGITAQSNSEKEWNETELKSEAVLKNLVIIHS

SEQ ID NO: 93650 - protein, 323 aa, Chryseobacterium taklimakanense
  misc_feature (1)..(323): tr|A0A239X5C9|A0A239X5C9_9FLAO Menaquinone-specific iso chorismate synthase OS=Chryseobacterium taklimakanense OX=536441 GN=menF PE=4 SV=1
MIFFKFPFGENFLSVDNKPDCTNVSFVSFTGENQLDFEGNVKEINDLPEVFSDDLSNITLEFPNEDQEKYVGKISSVIDFIKENDLKKLVIARQKLVPYGRLNDAGKINLTQTFLNVCRAYPNAFAYFFNKDGKCWIGAFSEVLGKFNKETSEFETMSLAGTLPVNENWTAKEIEEQKPVTAYISTILKNYSEHVEQSETTDHISGNIKHLRTDFKAKTDKKDLEKLISDLHPTPAVCGIPKDFCKNAIEKFEVLPRQFYAGYIRVETESHIQYFVNLRCAEFTKNAAIIYVGGGITAQSNPEKEWYETELKSEAILKNIAIS

SEQ ID NO: 93651 - protein, 397 aa, Ciceribacter sp.
  misc_feature (1)..(397): tr|A0A4Q2TT02|A0A4Q2TT02_9RHIZ Isochorismate synthase O S=Ciceribacter sp. F8825 OX=2509717 GN=EUU22_02395 PE=4 SV=1
MVHPSTLNDILPEDRAFPANRPSYVLRSGDETLLAYGVARELPGGTISDLASRVRRHFEEYPTGPDILVGAIPYAREASAYLLRPEKALRVMGRHELGVPGGHLAPQGFAMQVTADPSADAFSAAVARGLARLCEDGGSLRKIVLSRSVRLAVGNDISIPALIARLAVDDAVVTFATPLPPREGSPRFLVGATPELLVERRGPRVFSHPLAGSARRSPDSVHDREAAEALLRSEKDRREHALVVEQIMDVLSPLCTDLAAPDGVMLKATRSMWHLGTRIKGTLKDIGTSSIELAALLHPTPAVCGMPRSEADAAIRDLEGYDRGFYAGAVGWCDSSGDGRWYVSIRCAEIEGRNARLYAGAGIVPGSTPEGELAETAHKFSAMLEAFGLSVAQIGEA

SEQ ID NO: 93652 - protein, 468 aa, Citricoccus sp.
  misc_feature (1)..(468): tr|A0A4P9J9S3|A0A4P9J9S3_9MICC Isochorismate synthase O S=Citricoccus sp. SGAir0253 OX=2567881 GN=E7744_03585 P E=4 SV=1
MSNPGPGAPAPRLASITFARPVPGGGPLADLLATGDECAWIRFGDGLVGLGTAARFTTTGPDRFAAARRWWKAATAAEAADTPRSSVPDDGPPRRSPLAFAAFAFADDSPVDSVLVVPEVVVGSSRGRSWLSWQVDLDAPAYAARAAAGWRPTVAEAEDRLSTLLAAARRRRAAAGPGAPGTPVLADGAITPEGYREAVVRGVGHIEAGTLSKLVLARDAVVRTPGPLDVPGVLRTLSRRYRDCWTYAVGGLVGSTPEMLVKVDGDTARARVLAGTLDRDGAPAGADGADHARRHLSEDPKQRLEHRLAVESLTERLQPFTTALEAPDEPFVLELPNVWHLATDVTARLVGADGARRTGPGALALTEVLHPTAAVCGTPRETAAALIHRLEAEDHGMDRGLFAGPVGWLDGNGNGEFGIALRGAVVEDAHTARLYAGCGIVAASDPAAELAETTAKMRPMLQALGLCD

SEQ ID NO: 93653 - protein, 432 aa, Citrobacter amalonaticus
  misc_feature (1)..(432): tr|A0A515AIR2|A0A515AIR2_CITAM Isochorismate synthase M enF OS=Citrobacter amalonaticus OX=35703 GN=menF PE=3 S V=1
MHSLTTALEGLTRLLSQAIPAAPGIRVLDVPFPLNDAFDALSWLASQSIYPQFYWQQRNGDEEAAVLGVVAPFSSLDEAQCFLRQHPQQTDLRIWGLNAFDPEQGNLVLPRLEWRRCAGVAVLRLHLWSDVSLREDADRALTFLASLASVKPLPTLRLSKTAEQHWPEKAGWITLIEQATQTIAEGELDKVVLARASDLHFSRPVNAAAVMASSRRLNLNCYHFYMAFSAQSAFLGSSPERLWRRRDTALRTEALAGTVANHPDDYKAWQLGEWLMKDDKNQRENMLVVEDICQRLQDYTHTLDVLPPQVLRLRKVQHLRRCIWTALNQADDTLCLLQLQPTAAVAGIPRERARAFIQQREPFAREWYAGSAGYLSLQQSEFCVSLRSAKISGNVVRLYAGAGIVRGSDPEQEWQEIDNKAAGLRSLLQMDG

SEQ ID NO: 93654 - protein, 432 aa, Citrobacter braakii
  misc_feature (1)..(432): tr|A0A1V8P3L2|A0A1V8P3L2_CITBR Isochorismate synthase M enF OS=Citrobacter braakii OX=57706 GN=menF PE=3 SV=1
MHSITTALESLMRHLSQEIPAAPGIRIYDIPFPLNDAFDALGWLASQPVWPQFYWQQRNGDEEAAVLGAVATFSSLELAQHFLHQHNDNPDLRIWGLNAFEPQRGHLLLPRLEWRRCAGVASLRLHLFSDVSLREDAAQAVAFISSLANVKPLPALRLRLTGEQNWPDKTGWTDLIKLATQTINGEQLDKVVLARATDLQFSQSVNAAAVMASSRRLNLNCYHFFMAFSAKCAFLGSSPERLYRRRDTALRTEALAGTVANHPEDHRAWQLGEWLMKDDKNQRENMLVVEDICQRLQGCTQTLDVLPPQVLRLRKVQHLRRCIWTELNQADDTLCLMQLQPTAAVAGIPRELAREFIQQNEPFEREWYAGSAGYLSLRQSEFCVSLRSAKISENVIRLYAGAGIVRGSDPEQEWQEIDNKAAGLRTLLQMEG

SEQ ID NO: 93655 - protein, 432 aa, Citrobacter farmeri
  misc_feature (1)..(432): tr|A0A223JUN3|A0A223JUN3_9ENTR Isochorismate synthase M enF OS=Citrobacter farmeri OX=67824 GN=menF PE=3 SV=1
MHSLTTALEGLTRLLSQAIPAAPGIRVLDVPFPLNDAFDALSWLASQSIYPQFYWQQRNGDEEAAVLGVVAPFSSLDEAQRFLRQHPQQTDLRIWGLNAFDPQQGNLVLPRLEWRRCAGVAVLRLHLWSDFSLREDADRALTFLASLTSVKPLPTLRLSKTGEQHWPEKAGWINLIEQATQTIAEGELDKVVLARASDLQFSRPVNAAAVMASSRRLNLNCYHFYMAFCAERAFLGSSPERLWRRRDTALRTEALAGTVANHPDDYKAWQLGEWLMKDDKNQRENMLVVEDICQRLQDYTHSLDVLPPQVLRLRKVQHLRRCIWTALNQADDTLCLLQLQPTAAVAGIPRERARAFIQQHEPFAREWYAGSAGYLSLQQSEFCVSLRSAKISGNVVRLYAGAGIVRGSDPEQEWQEIDNKAAGLRSLLQIDG

SEQ ID NO: 93656 - protein, 432 aa, Citrobacter freundii
  misc_feature (1)..(432): tr|A0A243TUW8|A0A243TUW8_CITFR Isochorismate synthase M enF OS=Citrobacter freundii OX=546 GN=menF PE=3 SV=1
MHSITTALESLMRHLSQEIPAAPGIRIYDIPFPLNDAFDALGWLASQPVWPQFYWQQRNGDEEAAVLGAVAAFSSLESAQQFLHQHDNHPDLRIWGLNAFEPQRGNLLLPRLEWRRCAGVASLRLHLYSDVSLRDDAAQAVAFISSLANVKPLPALRLSLTGEQNWPDKAGWTNLIKLATQTIAGEDLDKVVLARATDLQFSQPVNAAAVMASSRRLNLNCYHFFMAFSADSAFLGSSPERLYRRRDTALRTEALAGTVANHPEDHRAWQLGEWLMKDDKNQRENMLVVEDICQRLQGCTQTLDVLPPQVLRLRKVQHLRRCIWTELNQADDTLCLMQLQPTAAVAGIPRELAREFIQQNEPFEREWYAGSAGYLSRRQSEFCVSLRSAKISANVVRLYAGAGIVRGSDPEQEWQEIDNKAAGLRTLLQMEA

SEQ ID NO: 93657 - protein, 432 aa, Citrobacter gillenii
  misc_feature (1)..(432): tr|A0A3E2KNI0|A0A3E2KNI0_9ENTR Isochorismate synthase M enF OS=Citrobacter gillenii OX=67828 GN=menF PE=3 SV=1
MHSITTALENLMRLLTQEIPAAPGIRIYDIPFPLNDAFDALGWLASQPVWPQFYWQQRNGDEEAAVLGAVATFSSLAVAQQFLHQHEDHPELRIWGLNAFEPQRGNLLLPRLEWRRCAGVATLRLHLYSDVSLQDDAVHARAFLSTLANVKPLPALRLNLTAEQHWPDKAGWTRLIELATQTIAGEALDKVVLARATDLQFSQPVNAASVMASSRRLNLNCYHFFMAFSAECAFLGSSPERLYRRRDTALRTEALAGTVANHPDDHRAWQLGEWLMKDDKNQRENMLVVEDICQRLQNCTQTLDVLPPQVLRLRKVQHLRRCIWTALNQPDDTLCLMQLQPTAAVAGIPRERARAFIQHNEPFEREWYAGSAGYLSLQQSEFCVSLRSAKISGNVVRLYAGAGIVRGSDPEQEWQEIDNKAAGLRTLLQMEA

SEQ ID NO: 93658 - protein, 408 aa, Citrobacter koseri
  misc_feature (1)..(408): tr|A8ADW8|A8ADW8_CITK8 Isochorismate synthase MenF OS=C itrobacter koseri (strain ATCC BAA-895 / CDC 4225-83 / SGSC4696) OX=290338 GN=menF PE=3 SV=1
MRIVDVPFPLNDAFDALSWLASQAIWPQFYWQQRNGDEEAAVLGAVETFPSLEQAQHFLRQHESQSDLRIWGLNAFEPQQGHLLLPRLEWRRAGAMATLRLYLYSPVSLREDARRAIAFLSSLRGVKPIPALRLHLTGEQHWPDKAGWTSLIQLATQTIAEDDLDKVVLARATDLQFSHSVNAAAVMASSRRLNLNCYHFFMAFSAGSAFLGSSPERLWRRRETALRTEALAGTVANHPDDHQAWQLGEWLMKDDKNQRENMLVVEDICQRLQSCTHSLDVLPPQVLRLRKVQHLRRCIWTALNQADDTLCLLQLQPTAAVAGIPRERARAFIQQHEPFEREWYAGSAGYLSLQQSEFCVTLRSAKVAANVVRLYAGAGIVRGSDPEQEWQEIDNKAAGLRTLLQMES

SEQ ID NO: 93659 - protein, 432 aa, Citrobacter murliniae
  misc_feature (1)..(432): tr|A0A4S3RR72|A0A4S3RR72_9ENTR Isochorismate synthase M enF OS=Citrobacter murliniae OX=67829 GN=menF PE=3 SV=1
MHSITTALESLMRHLSQEIPAAPGIRIYDIPFPLNDAFDALGWLASQPVWPQFYWQQRNGDEEAAVLGATATFSSLESAQQFLRQHEDNPELRIWGLNAFEPQRGNLLLPRLEWRRCAGMATLRLHLYSDVSLREDAARAGAFLSALASVKPLPTLRLNLIGEQHWPDKAGWTRLIELATQTIAREDLDKVVLARATDLQFSHPVHAAAVMASSRRLNLNCYHFFMAFSAECAFLGSSPERLWRRRDTALRTEALAGTVANHPDDHRAWQLGEWLMKDDKNQRENMLVVEDICQRLQNCTQTLDVLPPQVLRLRKVQHLRRCIWTALNQPDDALCLMQLQPTAAVAGIPRELAREFIQHHEPFEREWYAGSAGYLSLSQSEFCVSLRSAKINANVVRLYAGAGIVRGSDPEQEWQEIDNKAAGLRTLLQMEG

SEQ ID NO: 93660 - protein, 432 aa, Citrobacter pasteurii
  misc_feature (1)..(432): tr|A0A0A1RNC4|A0A0A1RNC4_9ENTR Isochorismate synthase M enF OS=Citrobacter pasteurii OX=1563222 GN=menF PE=3 SV =1
MHSITTALESLMRILSQEIPAAPGIRIYDIPFPLNDAFDALGWLASQPVWPQFYWQQRNGDEEAAVLGAVATFSSLESAQRFLRQHDNYPELRVWGLNAFEPQRGNLLLPRLEWRRCAGVATLRLHLYSDVSLREDAAQAAAFISTLAQVKPLPALRLILTGEQHWPDKDGWVRLIELATQTIAEEELDKVVLARATDLQFSQPVNAAAVMASSRRLNLNCYHFYMAFSAESAFLGSSPERLYRRRDTALRTEALAGTVANHPNDHRAWQLGEWLMKDDKNQRENMLVVEDICQRLQNCTQTLDVLPPQVLRLRKVQHLRRCIWTALNQADDTLCLVQLQPTAAVAGIPRELAREFIQHNEPFEREWYAGSAGYLSLRQSEFCVSLRSAKISANVVRLYAGAGIVRGSEPEQEWQEIDNKAAGLRTLLSIEG

SEQ ID NO: 93661 - protein, 432 aa, Citrobacter portucalensis
  misc_feature (1)..(432): tr|A0A4P7V9W5|A0A4P7V9W5_9ENTR Isochorismate synthase M enF OS=Citrobacter portucalensis OX=1639133 GN=menF PE= 3 SV=1
MHSITTALESLMRHLSQEMPAAPGIRIYDIPFPLNDAFDALGWLASQPVWPQFYWQQRNGDEEAAVLGTVAAFSSLESAQQFLHQHDNHPDLRIWGLNAFEPQSGNLLLPRLEWRRCAGVASLRLHLYSDVSLREDAAQAIAFISSLAPVKPLPALRLSLTGEQHWPEKAGWIDLIKLATQTIAGEDLDKVVLARATDLQFSQSVNAAAVMASSRRLNLNCYHFFMAFSADTAFLGSSPERLYRRRDTALRTEALAGTVANHPEDHRAWQLGDWLMKDDKNQRENMLVVEDICQRLQGCTQTLDVLPPQVLRLRKVQHLRRCIWTELNQADDMLCLMQLQPTAAVAGIPRELAREFIQQNEPFEREWYAGSAGYLSLRQSEFCVSLRSAKISANVVRLYAGAGIVRGSDPEQEWQEIDNKAAGLRTLLQMEG

SEQ ID NO: 93662 - protein, 432 aa, Citrobacter rodentium
  misc_feature (1)..(432): tr|D2TH10|D2TH10_CITRI Isochorismate synthase MenF OS=C itrobacter rodentium (strain ICC168) OX=637910 GN=menF PE=3 SV=1
MYSFTAALESLTRLLTQEISARPGIRVIDVPFPLNDAFDALSWLASQPVYPQFYWQQRNGDEEAAVLGAVCRFSSLDEAQRFLHQHPQQTDLRIWGLNAFDPRQGFLFLPRLEWRRCAGVATLRLHLCSAVSLREDTERALTFLTSLAGVKPLSTLRLTLTAERRWPEKAGWISLIRKATDTIAADGFDKVVLARASDLHFSRPVNAAAMMAASRRLNLNCYHFFMAFSANSAFLGSSPERLWRRRDTALRTEALAGTVANHPDDYKAWQLGEWLMKDDKNQRENMLVVEDICQRLQHHTQMLDVLPPQVLRLRKVQHLRRCIWTALNQPDDALCLMQLQPTAAVAGIPRDRAKNFIHQHEPFEREWYAGSAGYLSIQQSEFCVSLRSAKITDNVVRLYAGAGIVRGSDPEQEWQEIDNKAAGLRSLLQMDG

SEQ ID NO: 93663 - protein, 432 aa, Citrobacter sp.
  misc_feature (1)..(432): tr|A0A3S7DE55|A0A3S7DE55_9ENTR Isochorismate synthase M enF OS=Citrobacter sp. CFNIH10 OX=1920110 GN=menF PE=3 SV=1
MHSLTTALEGLTRLLSQAIPAAPGIRVLDVPFPLNDAFDALSWLASQSIYPQFYWQQRNGDEEAAVLGVVAPFSSLDEAQCFLRQHPQQTDLRIWGLNAFDPEQGNLVLPRLEWRRCAGVAVLRLHLWSDVSLREDADRALIFLASLASVKPLPTLRLSKTAEQHWPEKAGWITLIEQATQTIAEGELDKVVLARASDLHFSRPVNAAAVMASSRRLNLNCYHFYMAFSAQSAFLGSSPERLWRRRNTALRTEALAGTVANHPDDYKAWQLGEWLMKDDKNQRENMLVVEDICQRLQDYTHTLDVLPPQVLRLRKVQHLRRCIWTALNQADDTLCLLQLQPTAAVAGIPRERARAFIQQREPFAREWYAGSAGYLSLQQSEFCVSLRSAKISGNVVRLYAGAGIVRGSDPEQEWQEIDNKAAGLRSLLQMDG

SEQ ID NO: 93664 - protein, 432 aa, Citrobacter werkmanii
  misc_feature (1)..(432): tr|A0A4Q4BMC7|A0A4Q4BMC7_9ENTR Isochorismate synthase M enF OS=Citrobacter werkmanii OX=67827 GN=menF PE=3 SV=1
MQSITTALEGLMRHLSQEIPAAPGIRIYDIPFPLNDAFDALGWLASQPVWPQFYWQQRNGDEEAAVLGAVATFSSLASAQQFLRQHDNQPDLRIWGLNAFEPRHGNLLLPRLEWRRCAGVASLRLHLYSDVSLREDAARAVEFISTLANVKPLPALRLSLTGEQHWPDKAGWIDLIKLATHTINGEELDKVVLARATDLQFSQSVNAAAVMASSRRLNLNCYHFFMAFSADSAFLGSSPERLYRRRDTALRTEALAGTVANHAEDHRAWQLGEWLMKDDKNQRENMLVVEDICQRLQGCTQTLDVLPPQVLRLRKVQHLRRCIWTELNQADDTLCLMQLQPTAAVAGIPRELAREFIRQNEPFEREWYAGSAGYLSLRQSEFCVSLRSAKINANVVRLYAGAGIVRGSDPEQEWQEIDNKAAGLRTLLQMEG

SEQ ID NO: 93665 - protein, 421 aa, Citrobacter youngae
  misc_feature (1)..(421): tr|D4B7C3|D4B7C3_9ENTR Isochorismate synthase MenF OS=C itrobacter youngae ATCC 29220 OX=500640 GN=menF PE=3 SV =1
MRHLSHEIPAAPGIRIYDIPFPLNDAFDALGWLASQPVWPQFYWQQRNGDEEAAVLGAVATFSSLGSAQQFLRQHDNQPDLRIWGLNAFEPRHGNLLLPRLEWRRCAGVASLRLHLYSEVSLREDAACAVEFISTLAHVKPVPALRLSLTGEQHWPDKAGWTDLITLATQTINREALDKVVLARATDLQFSQPVNAAAVMASSRRLNLNCYHFFMAFSADSAFLGSSPERLYRRRGTALRTEALAGTVANHAEDHRAWQLGDWLMKDDKNQRENMLVVEDICQRLQGCTQTLDVLPPQVLRLRKVQHLRRCIWTELNQADDTLCLMQLQPTAAVAGIPRELAREFIQQNEPFKREWYAGSAGYLSLRQSEFCVSLRSAKINANVVRLYAGAGIVRGSDPEQEWQEIDNKAAGLRTLLQMEG

SEQ ID NO: 93666 - protein, 424 aa, Clavibacter michiganensis
  misc_feature (1)..(424): tr|A5CUV6|A5CUV6_CLAM3 Putative isochorismate synthase OS=Clavibacter michiganensis subsp. michiganensis (stra in NCPPB 382) OX=443906 GN=menF PE=4 SV=1
MTASRVRALLVDTTPVDSIARLVPLLDARHPLLWLRHGSGMGGIGEAIRLEFRGPDRVRDAAAAWREVAAAATVTDPLGIPGTGLIAFGAFAFADDSEAASVLVVPRLVVGRRDGVSWVTRIRLADQEDGDVASPLDALAAGSIPVPERSGAEYRLHLRPGSMGPDDYETAVARAVAAIAAGDVEKVVLARDLVGRLPLGGDLRLALSRFALGYPDCWTYAVDGLIGASPETLVRVGGGTVGARVLAGTVSRGTDARADAAAAAGLAASRKDNEEHAFARDSVLDALHPHSRDLSTTDAPFTLKLPNLWHLASDVTGTLGDGSSSLDLVGALHPTAAVAGHPTAAALSLIAELEPADRGRYAGPVGWVAADGDGEWAIALRGAQVDPSGAIVAHAGAGIVAGSDPERERAETAMKFRPVVEALG

SEQ ID NO: 93667 - protein, 358 aa, Clostridioides difficile
  misc_feature (1)..(358): tr|A0A4U9SSE8|A0A4U9SSE8_CLODI Isochorismate synthase f amily protein OS=Clostridioides difficile OX=1496 GN=dh bC PE=4 SV=1
MFVLSRPHGTVRGRGAVRGFTDVDAASAALRSGEVGALTGAIPFDLADPAALVVPEVLDFDDAPLAGGPPLSRIPLSTTLHPTADEHRERVAHAVKRIVAGDVGKVVLARSVDIVLDREVAPGELLDALAGGNAGHNAFGVDLGAATGSGSWLFGASPEVLLRKSGSVVTCHPYAGSAPRSPDPVVDRAVADGLFSSAKDLAEHAFVVDHLRDRLSHLCDDVDAPSTPRLQSTGEVWHLATPIRATLRDPATTALDLALLLGPTPAVCGTPSDVAAQIIREVEGERGFYAGAVGWCDAAGDGEWMVTIRCLELEADRRSLRTWAGGGIVEHSDPQGELEETAFKLRTVLNALGIDGLE

SEQ ID NO: 93668 - protein, 387 aa, Clostridium beijerinckii
  misc_feature (1)..(387): tr|A0A1S8PP53|A0A1S8PP53_CLOBE Isochorismate synthase D hbC OS=Clostridium beijerinckii OX=1520 GN=dhbC PE=4 SV =1
MEKKVLLNEINVNKNCLYFSTPEYELYTEQICDKIDFNTATNIPKIVEEFINKGALKGKMIVGAIPFDLEESGCLYVTNKWEVLQIPFKERKIVPSNSIQNNYVVNTKYVPTPERYMKMVEEAVKDIKGGSLDKIVLSRGVDLTFEKQVDVLEILKRLCVDNEAGYTYATNLYNNSFLVGASPEMLVSKRQKHIYSNPLAGSRPRGINANEDKLISEELMTSTKDQKEHKFVVNNIVDKISKICKEVTYQKIPVLIKTKQLWHLSTLIEGTLKDLRQTVLEAAITIHPTPAICGVPQSAAYKKIAELEGYNRGLFTGIIGWCDENGDGDWAIVIRGAQICPNNVKIRAGAGIVQDSEAVSELEETKVKFRTMLNGLGMNDLIERREI

SEQ ID NO: 93669 - protein, 456 aa, Clostridium botulinum
  misc_feature (1)..(456): tr|A0A0B4W906|A0A0B4W906_CLOBO Salicylate synthase OS=C lostridium botulinum Prevot_594 OX=1408284 GN=T258_799 PE=4 SV=1
MNNISDDYKIISYYEEKKLLNKDMYFTAVQICENSFYKDYIMYENNGELSIGIGRFATVIATPDKVTVELMGKTSTFDNEDINTTLHNAFMSIPLKNWRAYGIANFGLAYYNYGLHLTKEDNSLLKMLIPKLEIRLKNGEILIRALNSEDLVKMNEFVEKLNRDIKKEYELEHRIEKSKMMKVNIFDEKAEYYKSIVKKAVEEIKDKKYEKVILSRRILIDEKLDILGSYVAGRRVNNPARSYILNLQGLQVIGYSPETVAEVNKDGVVSTFPLAGTRAVGISEDETNKLKEELLRDPKEIAEHAVSVKLAYEELEKVCELNSVHVNEFMSVLKRGTVQHLASRLKGKLKKEYNEWHGFNALFPAVTASGIPKKEAIEAIERLEEEPRNLYSGSVLTYDSDGTIDAALVLRSIYQDDKHTWLRAGAGIVELSLPERELVETCEKLSSVSKKLISIE

SEQ ID NO: 93670 - protein, 385 aa, Clostridium paraputrificum
  misc_feature (1)..(385): tr|A0A2X3BI21|A0A2X3BI21_9CLOT Isochorismate synthase f amily protein OS=Clostridium paraputrificum OX=29363 GN =dhbC PE=4 SV=1
MTSEGDECVRGRRGPFDGRPATAPDFLLSRSHGSVRTQGSLATYSDPWLAAERLRRGEHQMIVGAIPFNPERPAALTVPREIIRSEQPLEPPAHYRWNPPEIKARIVGHDPAPEEHLERLDAAIRTIKVSGMDKVVLARAIDLAIDPAIDPLQLSSRLIDGSPNRDGFVADLGPAGGRFTGRMLIGSSPEMLVRRRGRIVEAFPLAGSAPRSRDRAADEAAAAKLMASRKNNEEHEFVVDDIADNLAPLCSHLDVPHEPQLLSTSEMWHLGTFIRGELKDPVISALDLALLVHPTPAICGTPTESAMSVIEAIESDRGFYAGCVGWCDSEGDGEFVVSIRCAEIDAAGTEARLWAGGGIVADSNPEEELAETTAKLRTVLRAFGL

SEQ ID NO: 93671 - protein, 384 aa, Clostridium pasteurianum
  misc_feature (1)..(384): tr|A0A0H3JAJ8|A0A0H3JAJ8_CLOPA Menaquinone-specific iso chorismate synthase OS=Clostridium pasteurianum DSM 525 = ATCC 6013 OX=1262449 GN=menF PE=4 SV=1
MKYHKIQIKLDNPLTFLKYFKNEESFFFYNPLKKEFIFGAKRLKALSLEECLKDYPYTFSSMTFFNSIKDEKWSGFGNENIAFEYYLIEKKGIQTLYYLKDFVEIENMKVEFYRHSFRYEMDDYNSWEQLFSAAHNAILNKELNKVVISREVKIKCNGSINTESILQNLLKQNANSFIFSYRKDGKTFLGATPEILIQKEKNNILSYALAGTVLRSYKEDEGEGEGLLVDIKNRHEHQIVIDSIVNSMRNFTDELTVDETKILELKNLYHLQTCIHGKNTSRTLLQWVKLLHPTPALGGDPVNKALELIKRYEKHERGLYAAPIGIIDENGDGIFVVGIRSALIEKNIVYAYSGCGIVDKSNCKSEYIETTNKLKTIIESLSDK

SEQ ID NO: 93672 - protein, 448 aa, Clostridium saccharobutylicum
  misc_feature (1)..(448): tr|U5MQ84|U5MQ84_CLOSA MbtI: isochorismate synthase/iso chorismate-pyruvate lyase MbtI OS=Clostridium saccharob utylicum DSM 13864 OX=1345695 GN=CLSA_c16880 PE=4 SV=1
MKYNEFQMNIDLKDNFDKYILATKICSEKKNVNHMLYESDDVIYVGIGEYSSIQVTEDTIVLETQSSVKQWDIKDLNIDLEIAFSEIQLEEWRAYGIANFGLAKFNYGLPLNNESNKLLKLFIPEIEYQITDESLKVRALQEKELNGISEKLKLLIEDIDNVKNTIDMKNKLEIQEIFSYDQEYYKDIVSKGVAEIKNKTYKKVILSRKIPIKENLDMELSYLVGRRANTPARSYILKFDDLQAFGFSPETVAEIDRERNVYTFPLAGTRAFFEDREKSDKLRRELLDDTKEIAEHAVSVKLADEELQQVCKMDTVVVTEFMSIMERGTVQHIGSRLRGTIKDEYNSWYAFNKLFPAVTASGIPKKESIDAIGRLEKDARDLYSGSVLIYDSNGALDAALVLRTIFQNSKETWIRAGAGIIEMSKPKREFEETCEKLSSVSKQLIKKE

SEQ ID NO: 93673 - protein, 381 aa, Clostridium sp.
  misc_feature (1)..(381): tr|G7M6I9|G7M6I9_9CLOT Isochorismate synthase OS=Clostr idium sp. DL-VIII OX=641107 GN=CDLVIII_4548 PE=4 SV=1
MKYYEKQISLNNPLSFLKHFRNEEKFLFYNPIKQEFIFGAKRLKTFSANENFNDYLYIFSSMTFFDSIKDTKWDNFGNENIAFEYYLVEKEGKQTLYYFKDFVEIENREIEVCDHSYKYEIDDYKTWKEMFSAVKNKILMKEVNKVVISREIKIQCDTSINAESVLQKLLKQNKNSFVFSYSKEGKVFLGATPEILVQKEGEEVLSYALAGTILRSDENDELQKEKLLKDNKNCYEHQIVIDSITDIMKKFTDELIVDETKILTLKNLHHLQTRILGKSKDTTLLQWVKLLHPTPALGGNPVDKATDLIRRYEKHERGLYAAPIGVVDGNGNGIFIAGIRSVLIEKNMAYAYTGCGIVDKSDCKDEYIETNNKLKTIIESL

SEQ ID NO: 93674 - protein, 485 aa, Coleofasciculus chthonoplastes
  misc_feature (1)..(485): tr|B4VGV3|B4VGV3_9CYAN Isochorismate synthases subfamil y OS=Coleofasciculus chthonoplastes PCC 7420 OX=118168 GN=MC7420_7446 PE=4 SV=1
MYMAYLSSHTDRLPDHKELYQFLVACQQASLEKGCTQIASISVPIPRVDPLAVLQILGGTQSFQFYLEKRKENEAILAIDATIYAELEGINRFQHAKTVIHNYLKDTWIWLQQNQTISFSGPHFFCFFTFFALNQPSPFRAATIFLPRWQVAFRENSGTVVANVQVDPHVNIKRLLQDLYNQIAEIKFSEHKPSSLTRINCSPFIPPKSINTEAFKSAVVAALNFIDANEFSKIVLANAVDIFSHQPFNLVHSLDNLRQRHPDCYIFCASNGKGQNFLGASPERLISIRDHLLVTDALAGSAPRGRTASEDAEFGDRLLGSEKEQREHQFVLDFITQRLSELGLIPQYLPAPQLLKLSNIQHLWTPIQAQLFTNVHPLDIVAQLHPTPAVAGVPTQIAQEQIRRYETFDRSLYAAPLGWIDYQGNCEFIVGIRSALIDSNPSSLNHDNTYRARLYAGAGIVAGSDPDKELAEIQLKLQALLKALL

SEQ ID NO: 93675 - protein, 413 aa, Collimonas arenae
  misc_feature (1)..(413): tr|A0A0A1FDM5|A0A0A1FDM5_9BURK Isochorismate synthase o f siderophore biosynthesis OS=Collimonas arenae OX=2790 58 GN=LT85_1804 PE=4 SV=1
MNDRLHHGFLKQASAADLLQHYQAGATFFASPRRSLLAHGVKVVMPPCEPGQIAANAAAWLKEAGREGLPPAVLMGVLPFRLDGSSASPYLYMPQQLASGAGVDSAVAALNPAGQTTGAQLSTPPLMQPTPEGYRDNVRSALAAIRDTRFAKTVLSRSLTLDAQIDIPALLQRLAARNLRGYTFAVDLAEAEKDGAHRTMIGASPELLLARYGRELVSHPLAGSIPRSADPVEDRRRADGLLQSVKDLHEHALVVDAVAAAMRPYCKNLKVPATPSLLATPTMWHLGTEVRGELADLATTSLEVALALHPTPAVCGHPAAPAAKFIADTEGFDRRYFAGLVGWCDSQGDGEWAVTLRCAEVGSGSATLYAGAGIVAGSEPQLELLETSAKLRTMLAAMNLELMLEDEQVKAAS

SEQ ID NO: 93676 - protein, 413 aa, Comamonadaceae bacterium
  misc_feature (1)..(413): tr|A0A3M6R8E3|A0A3M6R8E3_9BURK Isochorismate synthase O S=Comamonadaceae bacterium NML180581 OX=2478745 GN=EBQ2 4_00810 PE=4 SV=1
MPAALSADPSSAPGAPFAAASATEASATSATATLAAGEVFFTTPMQQQWRSHAHAQDIHCLAPATPHTVQTLFAQARTRGIGQAQLFAAIPFDVRQPASFSIPARLVQTSGPLPQQAAQTPDPALHTTPLPSPERYAELVRQALALLERGELHKIVLARALDVQAGGPLSPGAIVQRLAARNPHAFLFHIPLCNAAGAPHGSMLGASPELLVRRSGRQLTLHPLAGSIPRHADAAEDERRRQGLAASEKDLREHRYVTQDIARHLAPLCCEVDVPERPSVIGTDALWHLGTTITATLRDGATTALDVALALHPTPALCGSPTAQALAHIQALEPFARDYFAGLVGWQRENGDGEWAITIRCAQFDGQRRLRLYAGAGIVSGSDPEREVQETAAKLSTFLQSLQPQAIASQSQS

SEQ ID NO: 93677 - protein, 430 aa, Conservatibacter flavescens
  misc_feature (1)..(430): tr|A0A2M8S473|A0A2M8S473_9PAST Isochorismate synthase M enF OS=Conservatibacter flavescens OX=28161 GN=menF PE= 3 SV=1
MDNLQSLKRQVEQCLLTHQPNPQETISMYQFHVDFYGHLLSWLKAQSTYPQFYFNLRDSAEKLCAIGKVRSFSEVFSANQFVQQSGFTLIGGLTFDGASCFYLPRLLFQQQQNRLTLSVFIDNQVAFSEEKAAIAPLLDNLARYMAFDDIHSNRLQLIDQAHNQAAWCNMVQSALQALQHTELNKVVLANASDFQCIPALNAKDFLRESELVNTHCYHFLFAQDAERCFVGSSPECLYQRQDNHLITEALAGTAFVHHDTQQNQQQADWLLHDSKNQYENWLVVEGICQNLKHYAQNIDVSPLSIKQLRQVQHLYRQIFVELAPHIGDDRCLQAIHPTAAISGLPQQIAIDFIQKTEKFDRTWYAGTLGFISPQRAEFCVTIRSAIIEHNKIRVFAGAGIVEGSDPLLEWQEIERKAMGLISLLQSTTTQ

SEQ ID NO: 93678 - protein, 442 aa, Corallincola sp.
  misc_feature (1)..(442): tr|A0A368NIJ8|A0A368NIJ8_9GAMM Isochorismate synthase M enF OS=Corallincola sp. C4 OX=2282215 GN=menF PE=3 SV=1
MAVRQLPIPAKSDPSIPLLTQLSNLGPFRGPLQLVQTLDRVSGIPWLQAQSQYPKAYWQSRESDKELAASGCVRKFATANEASHCLSESAALPLVIMGALPFDDTNTPGTEQPLFFLPRLLWQRQDDNITLTLNLWVDEAHSFTDEMAAAKDALHTLRQPAHTPCPPLPDVLAVCNSPEQASWAKLVSQALAEQPILSKVVLARRQLLTTGQPCDPWLLLQRWHQANQHSTPFALQLDNQSSFIGCTPERLFKRDGRQLLSEAVAGTDVRPKDPLHARLIAMALLGDGKNRRENRIVLDDILSRLGPICDALSYDDRAQVLKLNRLQHLKRAIHGRLRKEICDADLLARLHPTPAVGGTPRADALRFIAAHEPFQRGWYAGAIGYLSHANSEFSVAIRSAHIEGCQLALYSGAGIVDGSDAHKEWQELDNKVATVRSLMGQK

SEQ ID NO: 93679 - protein, 436 aa, Corallococcus sp.
  misc_feature (1)..(436): tr|A0A3A8L9Q7|A0A3A8L9Q7_9DELT Isochorismate synthase O S=Corallococcus sp. CA053C OX=2316732 GN=D7V97_11670 PE =4 SV=1
MTPLSPAEGPHWVAGMMPLAGVDPLAGAGSLGIPSVYWERPVDREAAAGWGEAGVREAHVASELPAVLGSLGHEAVRWLGPVPVRMPGPWFGGMRFSPTGQVDGAWRSHGLARWTLPEVLVWREDNALYVAAFATDAQGGEDAVRSRLERVRASFSQTYRHAVGAPVALRTTSSRHDFEALVDRAVEAITTGHLHKVVLARAMDAEGPAPFDIVDVLARLREQNPRCATFLFRAPDGTGFLGATPETLCRVDGRVLETEALAGTAAPGGEAALDASDKDRREHEAVVRYILQALKPVAASVSADAQPSVLALKNVMHLRTGIRAKLGEGVDTAQVVTALHPTPAVGGTPRERALSFLVEHEALDRGWYAGPVGWVGPGRAHLVVALRSALVRGSHARLFVGAGIVAGSSAESEWRETEMKSLAMLRALGGGDVVRR

SEQ ID NO: 93680 - protein, 421 aa, Coriobacteriaceae bacterium
  misc_feature (1)..(421): tr|A0A143X9M2|A0A143X9M2_9ACTN Salicylate biosynthesis isochorismate synthase OS=Coriobacteriaceae bacterium C HKCI002 OX=1780377 GN=pchA PE=4 SV=1
MTKIFSHTRPIDADIVDAFCTLQKGFTDQFVYYRKDRPVRFMGLGRCIALPTLDDAECELEGPEAHQPVFFSFNRFDAGNPAPADELFEAFPRLRFMLPEIVLIEGECGPLLQVNSLGPVYPGRIERFVRQAAGAPPRRRESIPYRLEPDSREAWREAVAAALGAIGEGRVEKVVLSRRQRLVAARPFSSKDLLVNLIDGSARGTVLLYRYADVFFCGCTPELLVRKRGDAVESMCLAGTCPAGGSEKERARLADALMADAKNRAEHDYVARFIREVFHRTCYDVDVPDRPGILSLTHVQHLHTPARARMLDGMDLWSMMGDLHPTPAVAGTPVGEARMLLRRIEAYNRGFFAGACGYVDGAGDGEFSVALRTGVFDGEVGWVYAGCGIVEGSVADDEYDEIDLKLRTILSAFDGETHGGA

SEQ ID NO: 93681 - protein, 430 aa, Corticibacter populi
  misc_feature (1)..(430): tr|A0A3M6QY51|A0A3M6QY51_9BURK Isochorismate synthase O S=Corticibacter populi OX=1550736 GN=D8I35_01610 PE=4 S V=1
MSLPNIEPHMRATPGALPRTTLQREDAPLAARRSPDLSNCFMLHGAAQSLAATGVHKPLFQDSTHALTGCCDTVLGALDPDWAAAPLLVGAMPFDRDAPCWLYQPQTMHTIDSLLAPKAAGCAPAGGDSAQVQAVPDRRSYQDMVRQATARLGNGTAEALRKVVLARSLEISRTTPFDLRRLLRHLMNDASITTYCLPLPGPARHAAASHLVGATPELLITRRGKNIKSLPLAGSLPKQANPMLDQAATRRLLQSAKDLQEHRVVVEFIADLLNPLCANLAVPAHPSLCSTASMWHLGTHINGTLKHPDDLATSSSLALAARLQPTPALCGAPRDAALTLIRQLEPFERGFYGGTAGWSDNTGDGSWYVAIRCAEIQGPRARLFAGAGIMHDSSPAAEADETAAKFSAMLRALELEGLELFPTLGNTASR

SEQ ID NO: 93682 - protein, 367 aa, Corynebacterium accolens
  misc_feature (1)..(367): tr|E0MXF4|E0MXF4_9CORY Isochorismate synthase OS=Coryne bacterium accolens ATCC 49726 OX=862512 GN=entC PE=4 SV =1
MHEDRPSTAPDFLLSRATGSVRTQGARATFTSAEAAVDALRRGDAEMVVGAIPFDSDTPAALTVPESIIREDGPLEPHAFYRNQSLNSRVVGFDPEPEEHLRRVEAAIGTIETSKLEKVVLARAVDIEFAAPIDPRLVAARLIDLSVNRDGFIADLSPAGRPGAMLVGSSPEVLIKRQGSTVSAFPLAGSTPRRANKAADHIASQDLLHSAKDLLEHSFVVEHLRRILEPLCSSLDIPETPQLIHTNEMWHLGTPVTGTLRDKDLTALELAEVVHPTPAICGTPTEAAQALIETAETDRGFYAGTVGWCDSSGDGEYMVAIRCAEVAGDGLSARAWAGGGVVGASNAQAELEETTAKLQTILRALSL

SEQ ID NO: 93683 - protein, 369 aa, Corynebacterium ammoniagenes
  misc_feature (1)..(369): tr|D5NZR8|D5NZR8_CORAM Isochorismate synthase OS=Coryne bacterium ammoniagenes DSM 20306 OX=649754 GN=HMPREF028 1_02105 PE=4 SV=1
MCAQRPITAPDFLLSRATGSVRTQGSVNTYTDVDKAIDDIEAQRVEMVVGALPFDLDKPAALTVPKTIVREPAALEPPAYFRMQNLSSEVSGVDPDPHEHLRRVEAAVGTINASRLEKVVLARAVDIEFNGPVDPLLVAARLIDLSNHRDGFAADLTPAGYDGAMLVGASPEVLVKKKGNVVSAYPLAGSAARSADPEEDRLAGERLLASDKDLREHAFVVDHLAEILAPMCDTFYAPNTPQLVKTNEMWHLGTPISGTLKKPTTALELAVRCHPTPAICGTPTAAAKSLICTAETDRGFYSGAVGWCDASGDGEYMVAIRCAEVAGDGLTARAWAGGGIVEDSDPEEELAETTAKLQTIVRAMGIQNL

SEQ ID NO: 93684 - protein, 410 aa, Corynebacterium amycolatum
  misc_feature (1)..(410): tr|E2MTE8|E2MTE8_CORAY Isochorismate synthase OS=Coryne bacterium amycolatum SK46 OX=553204 GN=CORAM0001_0711 P E=4 SV=1
MSMENHPSLGGGNEEEKQENSHSSNEPAATPKHSTRWDTSRPTTAPDFLLSRAHGSIRTQGIEEQLSDPWLAAEGLHSGIHKMVVGALPFDLDKPAALTVPREVIRSSQPLEPPAHYRWNAPKPHANIVAYDPPLDEHAERIAAAIRTIEYSALEKVVLARAVELEIDPPIDPLLLASRLIDGSPNRDGFVVDLSPAGSDYEGKLLIGSSPEMLVRRTGDIVEAFPLAGSLPRSRNEEVDRATARRLADSRKNLDEHAFVVDDIADNLAPLCSSLDVPDSPELMSTAEMWHLATHIRGRLKDPSLSVLDLALVVHPTPAICGTPTESAFGVIQAVETDRGFYSGAVGWCDENGDGEFVVSIRCAEIDTEGSVARLWAGGGIVSHSDPEEEVTETSAKMGTVLRAFGVKGA

SEQ ID NO: 93685 - protein, 367 aa, Corynebacterium aurimucosum
  misc_feature (1)..(367): tr|C3PFX9|C3PFX9_CORA7 Isochorismate synthase OS=Coryne bacterium aurimucosum (strain ATCC 700975 / DSM 44827 / CN-1) OX=548476 GN=menF PE=4 SV=1
MCENRPSTAPDFLLSRATGSVRTQGSVATFSDVNAAVSALRSGTAPMVVGALPFHKGDPAALTVPRSIIREEGPLEPHAYYRSGTLNARVTGFDPEPEEHLRRIEAAIATIEASKLDKVVLARAVDIEFNAPVDPLLVAARLIDLSSHRDGFIADLTPAGRPGAMFVGSSPEVLIKKQGSTVTAFPLAGSAPRQADKARDIKAGQDLHNSAKDLREHAFVVDHIRRILQPLCETLDAPTAPQLTSTNEMWHLGTPIAGTLKDSDITALELAELVYPTPAICGTPTEAAQALIETAETDRGFYAGAVGWCDDSGDGEYMVAIRCAEVAGDGLSARAWAGGGIVVDSDPTAELQETTAKLRTILRALNL

SEQ ID NO: 93686 - protein, 367 aa, Corynebacterium camporealensis
  misc_feature (1)..(367): tr|A0A0F6QY41|A0A0F6QY41_9CORY Isochorismate synthase O S=Corynebacterium camporealensis OX=161896 GN=menF PE=4 SV=1
MHETRPSTAPDFLLSRANGSVRTQGALRTFDNADAAIDALRGGEAEMVVGAIPFDADTPAALTVPRSIIREDGPLEPPAYYRNGTLNARITGFDPEPEEHLRRIEAAIATIDNSKLSKVVLARAVDIEFFAPVDPRLVAARLIDLSANRDGFIADLSPAGRPGSMLVGSSPEVLVKRQGSTVSAFPLAGSAPRQANAAHDQIAGQDLLHSTKDMQEHAFVVDHLRQALEPLCERLDVPERPQLVSTNEMWHLGTPIVGTLKDSDLTALELALAVHPTPAICGTPTDAARALIETAETDRGFYSGAVGWCDATGDGEYMVAIRCAEVSGDGLSARAWAGGGIVIDSDPSAELAETTAKLRTMLRALNL

SEQ ID NO: 93687 - protein, 367 aa, Corynebacterium canis
  misc_feature (1)..(367): tr|A0A5C5UTR6|A0A5C5UTR6_9CORY Isochorismate synthase O S=Corynebacterium canis OX=679663 GN=FRX94_01730 PE=4 S V=1
MCSRPSTAPDFLLSRAHGSVRTQGSLTTYTDPWEAAEALRRGAHTMIVGAIPFDLEQKAALHVPAHIVRTKGPLEPPAHYRLERRIDAELLCDDPVRTEHQERVRAAVETIRRTRLDKVVLARAVDISFLEPVDPLLIAARLIDYSPDRNGFFTDLSPAGGRFLGRWLVGSSPEVLIRRVGDRVSTYPLAGSAPRSGIREDDRRTAKHLQDSAKDLAEHKFVVDHIAAALRPLCTELSVPKTPEITSTAEMWHLATPISGTLKDPRTTALDVALRVHPTPAICGTPTPLAKDLILQVETDRGFYSGAVGWCDAEGNGEFMVAIRCAETDGMHARAWAGGGLVNHSNPESELRETDAKLRTMMRALGL

SEQ ID NO: 93688 - protein, 385 aa, Corynebacterium casei
  misc_feature (1)..(385): tr|G7I0P2|G7I0P2_9CORY Isochorismate synthase OS=Coryne bacterium casei UCMA 3821 OX=1110505 GN=dhbC PE=4 SV=1
MQANDNNCSDHPIFDFITPEYRLTGHGRRVKLSPTGWNGEEVAAAIETALKGVPFGLPVVGCIPFDTQKAAELYVPEEVTWGKGLEKETPASVAQTTIRTDDGDVPTPNSAQYRASVAKAVRSIENGELEKIVLARTATIKTPSAIEPCVIVKDLAKHNPNSFVYRSDISSGTLVGATPELVLRSWAGTITSFPLAGSIPVGGADELAREKLKETLLSSPKDRAEHGLVVHQVGETFKQYLDDAHIPSSPEIVETPVILHLGTRISGHLESELSSRVSTVMRLLYDLHPTPAVCGWPTSVARRKIQELEDFDRGMYSGLIGWIDAQGNGEWALALRGGVINGESATLYAGAGIVAGSDPEHEHAETAAKFQTIARVIERQRTLHL

SEQ ID NO: 93689 - protein, 427 aa, Corynebacterium choanis
  misc_feature (1)..(427): tr|A0A3G6J5R6|A0A3G6J5R6_9CORY Isochorismate synthase D hbC OS=Corynebacterium choanis OX=1862358 GN=dhbC PE=4 SV=1
MKESAWDGRTGGRTDAALRVLGAVVGYSSSTTSPAMCDCQVVITLTTTMTDSRPASAPDFLLSRASGSLRTQGSASTFSDVDEAMWALAHAKVDLVVGALPFRFDDPAALTVPKHAIFSAGPLEPHAYYRTGEGSKLSAQVLREVPSVAVHEERVAALIRTIANTAVEKVVLARAIDIAFDPPVDPLTVAAKLIDLSASLDGFAVDLTPAGERFAGSMLVGSSPEVLLKKQGATVTAFPLAGSLPRGRTPEEDAANKEALHNSAKDIAEHRFVVDALVDTLGPLCEQIDYPQRPEITATAEMWHLATPITATLRSADITALDLAVRCHPTPAVCGTPQALAYDLINTIEQPRNFYGGAVGWSDKDGNGEFMVAIRCAEVAADGNSARAWAGGGIVAESHAADEVQETSAKLRTIARALQIDVGPTTS

SEQ ID NO: 93690 - protein, 376 aa, Corynebacterium deserti
  misc_feature (1)..(376): tr|A0A0M4CWW5|A0A0M4CWW5_9CORY Putative isochorismate s ynthase OS=Corynebacterium deserti GIMN1.010 OX=931089 GN=menF PE=4 SV=1
MSAHRDPAAPSTAPDFLLSRGHGSVRTQGARETFTDAWAAIDALKSGRVPMVVGALPFERDKPAALTVPEVIIREDGPLEPHAYYRFGPGSQLHAEVAGLDPSPIEHLRRVNAAINTITNTVLEKVVLARAVDISFDPPVDPLLVAARLIDNSHNKDGFIADLSPAGPSFEGHMLVGSSPEVLIKRQGSTVSAYPLAGSAPRLSDPSRDSAQGRTLLASAKNLSEHSYVVNHLRTVLSPLCSTLDISDVPELTKTNEMWHLATPIVGTLKDSGISALELATLTHPTPAVCGTPTDAAEALIASAESPRNFYAGAVGWCDSTGDGEYMVAIRCAEVSGDGTWARAWAGGGIVESSDAQEEFDETTAKLQTIMRSLGL

SEQ ID NO: 93691 - protein, 377 aa, Corynebacterium diphtheriae
  misc_feature (1)..(377): tr|A0A3S7LTD4|A0A3S7LTD4_CORDP Isochorismate synthase O S=Corynebacterium diphtheriae OX=1717 GN=menF PE=4 SV=1
MCAHRPSTAPDFLLSRSHGSIRTQGAVETFSDPRKAVEALRSGRVELVVGALAFRRDHACALTVPRSVIREEGPLEPHAYYRQGPGSIVNAQVEKLVPSLDEHHARVEAAINTIKSTSLKKVVLARAVDMTFSPAVDPRLIAARLIDLSRNRDGFIADLTPAGEDFAGAMLVGSSPEVLIKKQGSTVTAYPLAGSAPRSADAVTDATNAELLRRSHKDLQEHSYVVEHLRNVLEPLCSKLSIPANPELTKTNEMWHLATPVVGTLKDASLTALELAMRTHPTPAICGTPTDAAEELISIAEGDRRFYAGTVGWADNHGDGEFMVSIRCAEVSSDGTSARAWAGGGIVAESDAAAEVEETTAKLRTIMKALGITSFDA

SEQ ID NO: 93692 - protein, 367 aa, Corynebacterium endometrii
  misc_feature (1)..(367): tr|A0A4P7QFK1|A0A4P7QFK1_9CORY Isochorismate synthase D hbC OS=Corynebacterium endometrii OX=2488819 GN=dhbC PE =4 SV=1
MDIPRPATAPDFLLSRATGSVRTKGSVTTFTDPWQAADYLRSGKAEMVVGALPFNLDEAAALTVPESIIREDGPLEPHAFYRRGTLVARVAGYDPEPEEHLSRVEAAIATIERSKLDKVVLARAVDITFPQPVDPRLVAARLIDNAVNRDGFIADLSPAGREGAMLVGSSPEVLIKKQGSTVTAFPLAGSAARHPDPERDEARGKALAHSAKDLAEHRYVVDHLRRVLNPVCSRLDAPRTPQVIQTREMWHLGTPIVGTLASSQTSALDLALAVHPTPAICGTPAEAAQAIILDCESDRGFYAGAVGWCDSAGDGEYMVAIRCAEVAGDGLSARTWAGGGVVAESNAHEELAETSAKLRTILRSLDL

SEQ ID NO: 93693 - protein, 367 aa, Corynebacterium epidermidicanis
  misc_feature (1)..(367): tr|A0A0G3GP82|A0A0G3GP82_9CORY Isochorismate synthase O S=Corynebacterium epidermidicanis OX=1050174 GN=menF PE =4 SV=1
MSNPRPSTAPDFLLSRTHGSVRTQGSIRTFTDPWDAVAALKNGEAEMVVGALPFLRGAPAALTVPEKIVREDGPLEPHSYYRIGPGSELTAAITGFDPDPAEHEERVAAAVATLKNTALEKVVLARAVDISFTTPVDPRLVAARLIDNSHNFDGFIADLGPVGRGFLVGSSPEVLIKLQGSTVTAYPLAGSAPRSADPVADHVAGADLQASTKDLAEHRFVVEHLLRLLEPVCSSLSAPTVPELTKTDEMWHLATPIVGTLAREMTALELALLVHPTPAICGTPVDAAEALIESVETPRGFYAGAVGWCDASGDGEYMVAIRCAEVEPDGLTARAWAGGGIVASSSPSAELAETDAKLRTILRALGL

SEQ ID NO: 93694 - protein, 380 aa, Corynebacterium falsenii
  misc_feature (1)..(380): tr|A0A418Q743|A0A418Q743_9CORY Isochorismate synthase O S=Corynebacterium falsenii OX=108486 GN=D3M95_06085 PE= 4 SV=1
MTHEQRPVTAPDFLLSRPDRSIRTQGRVTTYPDPFEASTALRSQEAELIVGAIPFDTSHRAALMVPEKVVRTEGPLEPPAYFRGTKAAESLQVEAVEAVTTLAEHRATVAAAVSTIQQTRLDKVVLARAVDVEFADEVDPLLIAARLIDLSAHRDGFAVDLSATGREEHAHSMFVGSSPEMLIRKKGREVSAFPLAGSAARTGNLERDQATGRSLLSSMKDQVEHQFVVDHYRRTLEPLCSKLSIPPYPEIHETNEMIHLGTRVEGTLKDDGFSALDLALMLHPTPAIGGTPTDDAIGIIEQVEQPREFYAGAVGWCDADGDGEFMVAIRCCVVEGASARAWAGGGIVADSSPEDEAAETTAKLQTVLRALNVPAAMRNV

SEQ ID NO: 93695 - protein, 383 aa, Corynebacterium genitalium
  misc_feature (1)..(383): tr|D7WD77|D7WD77_9CORY Isochorismate synthase OS=Coryne bacterium genitalium ATCC 33030 OX=585529 GN=HMPREF0291 _11765 PE=4 SV=1
MRCLPGTLKSLLMPSPRPETAPDFLLSRASGSVRTQGTTSTFIEPWDAVAALQRREVNMVVGALPFDRDAPAALTVPEQIITEAGTLQPHSYYREGPGAQLHAAVAGYDPEPHEHLRRVEAAVDTICNSILDKVVLARSVDFVFDPPVDPRLVAARLIELSSTRDGFIADLTPAGKPGHMIVGSSPELLIRKQGLEITSYPLAGSAPRIFDDEDADRAAGEKLYNSTKDLDEHSYVVEHIRDILTPLCRELTIPDRPVLDRTNEMWHLATPIKGVLYDPAPSALDLATRLYPTPAVCGSPQYAAEALITTAETDRSFYAGTVGWCDSHGDGEYMVSIRCAEVNGDGTAARAWAGGGLVAASKPEEELAETTAKLLTIQRALGL

SEQ ID NO: 93696 - protein, 404 aa, Corynebacterium geronticis
  misc_feature (1)..(404): tr|A0A3G6J7V4|A0A3G6J7V4_9CORY Isochorismate synthase D hbC OS=Corynebacterium geronticis OX=2079234 GN=dhbC2 P E=4 SV=1
MSSCASIESSAPSAVFCDEHSTLITRGISQKFSSVEAAIQALKTGQETLVVGALPFHQGDAVSLFSPDSQRRSGPLPASSIESASLPPTDSRRSSVADVSFDFTPNQHRDRIAATVEKILSGQMQKVVLSRGIELRLCESELAQRVSDPWWMVRRFLQSNPNGQGHMVTLEPAGEPYCGAFFVGSNPELLIARKGRHIEALPLAGTVPRCKDPVQDQARATELQLSAKNLHEHAFVTADIAETLSNYCTSLEVPASPCVTATSHTWHLGTPIRGTLRGEPASALELAAMLHPTPAVSGFPQKSACEFLTNEEPHRGFYAGAVGWTDARGDGAWRVAIRGATVFTQKGEDASVRIHARSGGGIVAASLPDDEVQETTAKLGPVFRALGLDLEQLQISENRKDVFA

SEQ ID NO: 93697 - protein, 379 aa, Corynebacterium glaucum
  misc_feature (1)..(379): tr|A0A1Q2HW80|A0A1Q2HW80_9CORY Isochorismate synthase D hbC OS=Corynebacterium glaucum OX=187491 GN=dhbC PE=4 S V=1
MPSSRLPSRPSSAPDFLLSRTSGSVRTQGVERTFTDVREASAALTRGEVEMVVGALPFNKAEPAALTVPASIIREPGILNPHPYYREGPGAVLHARVAGFDPSPDEHLRRVALAVDEIRRTALEKVVLARAVDIAFDPPVDPRLVAARLIDLAASGDGFIADLSPAGRDGHFLVGSSPEVLVKRQGVRVSSYPLAGSAARKIDDPVADAAAGERLASSAKDLEEHRFVVEHIRDILAPFCTELTVPARPILEKTNEMWHLATPIAGILRESPTTPAPSALELAEMLYPTPAVCGTPQDAAAKMILQTESDRGFYAGAVGYTDASGDGEYMVAIRCAEVNGAGNQARAWAGGGLVASSDPQSELDETTAKLRTISRALSL

SEQ ID NO: 93698 - protein, 350 aa, Corynebacterium glucuronolyticum
  misc_feature (1)..(350): tr|C2GFT5|C2GFT5_9CORY Isochorismate synthase OS=Coryne bacterium glucuronolyticum ATCC 51866 OX=548478 GN=dhbC PE=4 SV=1
MSRVHGSVRTQGRAAFYTSVDEAIAALPTAGLIVGALPFDPSAPAALTVPKSVIWEETSLHPHPYYLTGEGSTLKAHIAGFDPSPEEHLARVTAAVEALKRGNLDKVVLARAVDIAFDEPVDPRLVAARLIATSSSHDGFIVDLGGSWLVGCSPEVLVRKQGAEVTCYPLAGTAPRSADPVEDQAAANRLLASAKDLAEHRFVVDDIRASLEPLTSSLTIPDTPELTSTNEVWHLATPIRGKLSDPTLTALDLARAVHPTPAICGTPEEAARQMILDVESDRHFYAGTVGWADAKGNGEFMVAIRCAEVSEDGTRGRAWAGGGIVAQSDPQQELEETTAKLGTILRALGL

SEQ ID NO: 93699 - protein, 376 aa, Corynebacterium glutamicum
  misc_feature (1)..(376): tr|A0A1R4FZS5|A0A1R4FZS5_CORGT Isochorismate synthase O S=Corynebacterium glutamicum OX=1718 GN=FM102_08460 PE= 4 SV=1
MSAHRNPSAPNTAPDFLLSRGHGSVRTQGSKEVFTDPWEAVDALKQGRVAMVVGALPFERDKPAALTVPEHIIREDGPLEPHAYYRFGPGSVLHASVAGIDPSPIEHLRRVNAAINTINNTVLNKVVLARAVDISFEPPVDPLLVAARLIDNSHNKDGFIADLTPAGPDFDGHMLVGSSPEVLIKRQGSTITAYPLAGSAPRLTDPVRDEAQGQNLLASAKNLEEHSYVVNHLRTILEPLCSQFDAPTVPELTKTNEMWHLATPIVGTLKYPHITALELAIRTHPTPAICGTPTDAAEALIIEAESPRNFYAGAVGWCDSTGDGEYMVAIRCAEVSEDGTWARAWAGGGIVAESDAQEEFDETTAKLQTIMRSLGL

SEQ ID NO: 93700 - protein, 408 aa, Corynebacterium glyciniphilum
  misc_feature (1)..(408): tr|X5EB67|X5EB67_9CORY Isochorismate synthase OS=Coryne bacterium glyciniphilum AJ 3170 OX=1404245 GN=CGLY_0708 0 PE=4 SV=1
MAERVGARARTCGTSNFSLFRPPEYGGCVINNDRPSTAPDFLLSRASGSIRTQGTRTSFPDPFEAATALRDGSARLVVGAVPFDTGNRAALTVPGTVIETEGPLEPPAHYRGRELGDRLEVVNVHPLSSSEEHQSTVAAAIETMHNTTLRKVVLARAVDIEFAEEVDPLLIAARLIDLSAHRDGFAVDLSATGRSDDRGTMLVGSSPEVLIRRRGTTVEARPLAGSAARLADRQADETVGRMLRDSTKDLTEHELVVDHYRQVLSGVCSELSIPDAPELIKTNEMWHLATPVRGTLPDLNFSALDLALMLHPTPAVGGTPTDDAIGIINEVEEPRCFYAGFVGWCNDDGDGEYMVSIRCAEVAGATARAWAGGGVIASSSPAAEAAETTAKLQTALRALNVPATMRAV

SEQ ID NO: 93701 - protein, 377 aa, Corynebacterium godavarianum
  misc_feature (1)..(377): tr|A0A556QFI7|A0A556QFI7_9CORY Isochorismate synthase O S=Corynebacterium godavarianum OX=2054421 GN=FPH17_0293 5 PE=4 SV=1
MPHTPASDSLRPASAPDFLLSRPGGSVRTQGAARRFSDAWDAIDALEAGDVDMLVGALPFDQDCPAALTVPEKIVRESGTLEPHPYYRVGPGAQLSASVTSFDPSPQEHLRRIEAAIGTIESSKLNKVVLARAVDIAFDPPVDPRLVAARLIDLSYTRDGFIADLTPSGRTGHFLVGSSPEVLVKRRGSEVSSRPLAGSAARIPHDRDADEAAAAALYNSAKDLGEHAYVVEHIRRVLAPLCSRLDIPDRPELEKTSEMWHLATPIRGVLKAPAPSALDLALRLYPTPAVCGTPSDAAEALITTAETDRGFYGGAVGYTDANGDGEYMVAIRCAEVDAAGATARTWAGGGLVVDSDPQAELDETSAKLRTIMRALGL

SEQ ID NO: 93702 - protein, 377 aa, Corynebacterium gottingense
  misc_feature (1)..(377): tr|A0A3M0U9U5|A0A3M0U9U5_9CORY Isochorismate synthase O S=Corynebacterium gottingense OX=2041036 GN=EAW56_05845 PE=4 SV=1
MPHTPASDSLRPASAPDFLLSRPGGSVRTQGAARRFSDAWDAIDALEAGDVDMLVGALPFDQDCPAALTAPEKIVRESGTLEPHPYYRVGPGAQLSASVTSFDPSPQEHLRRIEAAIGTIESSKLNKVVLARAVDIAFDPPVDPRLVAARLIDLSYTRDGFIADLTPSGRTGHFFVGSSPEVLVKRRGSEVSSRPLAGSAARIPHDRDADEAAAAALYNSAKDLGEHAYVVEHIRRVLAPLCSRLDIPDRPELEKTSEMWHLATPIRGEIKDPAPSALDLALRLYPTPAVCGTPSDAAEALITTAETDRGFYGGAVGYTDASGDGEYMVAIRCAEVDAAGATARTWAGGGLVIDSDPQAELDETSAKLRTIMRALGL

SEQ ID NO: 93703 - protein, 382 aa, Corynebacterium imitans
  misc_feature (1)..(382): tr|A0A239ZBX1|A0A239ZBX1_9CORY Isochorismate synthase O S=Corynebacterium imitans OX=156978 GN=dhbC PE=4 SV=1
MPQTPAHNSPTPDHRRPASAPDFLLSRAHGSVRTQGSVRQFSDAFAAIDAIEAGEVDMVVGALPFDQNCPAALTVPETIVRESGTLEPHPYYRVGPGSRLSASVTSYDPAPQEHLRRIEAALGTIEASKLDKVVLARAVDIAFDPPVDPRLVAARLIDLSFTRDGFIADLTPAGRPGNFFVGSSPEVLVKRRGMEVASHPLAGSAARIPHDREADEAAAKALYNSAKDLDEHAYVVEHIRGILAPLCTRLEIPERPQIEKTSEMWHLATPIRGELKDPAPTALDLALRLYPTPAVCGTPPEAAEALITTAETDRGFYAGAVGYTENNGDGEYMVAIRCAEVDASGTSARTWAGGGLVLGSDPQAELDETSAKLRTIMRALGL

SEQ ID NO: 93704 - protein, 383 aa, Corynebacterium jeikeium
  misc_feature (1)..(383): tr|A0A381KE20|A0A381KE20_CORJE Isochorismate synthase O S=Corynebacterium jeikeium OX=38289 GN=menF PE=4 SV=1
MAPMTHEQRPATAPDFLLSRPDRSIRTQGRKATFPDPFEASTALRNKEADLIVGAFPFDTSLRAALMEPETVVRAEGPLEPPAFFRGKDAARSLTVESVEAQTTAEEHTAMVAAAVATIQQSRLEKVVLARAVDITYAETVDPLLIAARLIDLSAYRDGFAVDLSATGRSEYQGAMFVGSSPEMLIRRDGRHISAFPLAGSAPRTGTLSIDDATARELGSSDKDLREHRFVVEHYRRVLEPLCETLDIPATPEIHETNEMIHLGTQIAGTLKDDEYSALDLALMLHPTPAIGGTPTDDALGVIAQEKSPREFYSGAVGWCDSSGDGEFMLSIRCAIVEDNTARAWAGGGIVVDSIPAMEAEETSAKLQTALRALNVPAALREV

SEQ ID NO: 93705 - protein, 354 aa, Corynebacterium kutscheri
  misc_feature (1)..(354): tr|A0A0F6QZB1|A0A0F6QZB1_9CORY Isochorismate synthase O S=Corynebacterium kutscheri OX=35755 GN=menF PE=4 SV=1
MRTQGAQQHLDNIDDAVDLLRAKKVDMVVGALAFRRDHKAALTVPVSIIREDGPLEPHAYYRHGSGAILRAQLAKLIPDIEEHHIRVQAAIDTISRSELKKVVLARAIDIDFSPPVDPRLVAARLIDLSFTKDGFIADLSPAGEDFLGHTLVGSSPEVLIKKQGSTISAYPLAGSAARSMIPREDKLRGEELRRSSKDLVEHQFVVEHLRRLLIPLCSTLTIPDYPELTCTNEMWHLATPVVGTLKDPHYTALELARLIHPTPAICGTPTDAAEELIALAEGDRRFYAGAVGWCDNTGDGEYMVAIRCAEINAEGTHARAWAGGGIVAESDAHAEVAETSAKLRTIAKALGLKI

SEQ ID NO: 93706 - protein, 373 aa, Corynebacterium lipophiloflavum
  misc_feature (1)..(373): tr|C0XPL6|C0XPL6_CORLD Isochorismate synthase OS=Coryne bacterium lipophiloflavum (strain DSM 44291 / CCUG 3733 6) OX=525263 GN=dhbC PE=4 SV=1
MQSARPATAPDFLLSRSHGSVRTQGCAGAFTDIDEAIDAIDRGAVEMIVGALPFDQDAEAALTVPDTIVCEPGTLEPHPFYRVGQGSKLSARVCGFDPSPVEHLRRIEAAVATIQNSALDKVVLARAVDIAFDSPVDPRLVAARLIDLSYTRDGFIADLTPAGFHGHMLVGSSPEVLVRRRGNRVSSYPLAGSAPRVLDDASADRAAAKNLFESTKDLVEHAFVVDHIRSVLGPLCSSLTVPERPIVDKTNEMWHLATPITGVLKDPAPSALDLAERLYPTPAVCGTPTEAAKALICTAETDRSFYAGAVGYTEANGDGEYMVAIRCAEVSGDGTTARAWAGGGLVADSDPQAELDETTAKLRTIMRALGLSL

SEQ ID NO: 93707 - protein, 385 aa, Corynebacterium lowii
  misc_feature (1)..(385): tr|A0A0Q0UAK1|A0A0Q0UAK1_9CORY Isochorismate synthase D hbC OS=Corynebacterium lowii OX=1544413 GN=dhbC PE=4 SV =1
MPKTPASNRAVSRNDLFFWQGRGTRYAPAQALSAVPAARSENPWRPGTIVAGALPFDVASAAAPALWELPAWEEAEPLLLDAAAPARLRNLRPASAPGNYISAVRRAVEELSAAETPMEKVVLAREVRAELAEEPAWPDLLASLVERNPTATTFSVPLPGGASGAGLSEGDPADVFFGATPELLLRKEGATVLSHPLAGSIPRSANPEEDRRRAEGLLLSAKDAHEHAFVTQMIGQALAPVCAELDVPAQPSLLATDTMWHLGTRISGRLKAEEQHRDALSLARLLHPTPAVAGWPTGAAMSAIRDLEHADRGLYAGAVGWVDANGDGQWSVSIRCGLLRGLELSAWGGAGIVAQSEAESELRETSAKLRTIVEGLGVQIEGAQA

SEQ ID NO: 93708 - protein, 367 aa, Corynebacterium macginleyi
  misc_feature (1)..(367): tr|A0A3M0GPW8|A0A3M0GPW8_9CORY Isochorismate synthase O S=Corynebacterium macginleyi OX=38290 GN=D9543_07100 PE =4 SV=1
MHEDRPSTAPDFLLSRATGSVRTQGARATFTSAEAAVDALRRGNTDMVVGAIPFDSDTPAALTVPESIIREDGPLEPHAFYRNQTLNSCIVGFDPEPEEHLRRVEAAIGTIETSKLEKVVLARAVDIEFSSPIDPRLVAARLIDLSVNRDGFIADLSPAGRPGAMLVGSSPEVLIKRQGSTVSAFPLAGSTPRRANKSADHIAGQDLLHSAKDLLEHSFVVEHLRRVLEPLCSSLDIPDTPQLLHTNEMWHLGTPVAGTLRYKNLTALELALAVHPTPAICGTPTEAARALIETAETDRGFYAGTIGWCDNSGDGEYMVAIRCAEVAGDGLSARAWAGGGVVGASNAQAELEETTAKLQTILRALSV

SEQ ID NO: 93709 - protein, 370 aa, Corynebacterium marinum
  misc_feature (1)..(370): tr|A0A0B6TL63|A0A0B6TL63_9CORY Putative isochorismate s ynthase OS=Corynebacterium marinum DSM 44953 OX=1224162 GN=menF PE=4 SV=1
MCAHRPVTAPDFLLSRAHGSVRTQGSLETFTDPWAAIEALRSGRVPIVVGALPFDRSAPAALTVPEHVIREDGPLEPHSYYRQGPGSVLHARIVGVDPEPEEHLRRVEAAVSTIRASKLEKVVLARAVDIAFSPAVDPLLVAARLIDNSYNCDGFIADLSPAGRPGDMIVGSSPEVLVKRQGSTVTAYPLAGSAPRQADPDADLDVGRRLADSAKDLDEHRYVVEHLREKLGPFCAHLSIPERPEVTRTNEMWHLATPIVGTLKDPAVTALELAVHTHPTPAICGTPTDAAEALIETAEADRGFYAGVVGWCDDSGDGEYMVAIRCAEVTGDGRFARAWAGGGIVADSDPAEELTETTAKLRTILRSLGL

SEQ ID NO: 93710 - protein, 419 aa, Corynebacterium mastitidis
  misc_feature (1)..(419): tr|A0A2N0X7G0|A0A2N0X7G0_9CORY Isochorismate synthase O S=Corynebacterium mastitidis OX=161890 GN=CXB45_06380 P E=4 SV=1
MWPARWTSLPPRQPATSPSRSSSWTGVPACMPETPREETTDALRDPLTRGDLLFCQPDRSRYLPAAALTPVPPSAAENPWRPGMVVAGAVPFDEAGPTPPALWTAPAWRAWRRGAQEEPAEAARPRLRGVYPTRAPWEYVRAVRRAVERLSAPDGAVEKVVLAREIRATLGEEPDWAALMGRLADRNPSATVFSVPVPGEADPGAVFFGASPELLLRKSGDAVLSHPLAGSVPRSADPEEDRSRANALLESAKDAREHAFVTRMIGQALAPVCAELSVPAAPSLLATDTMWHLGTRIEGRLAPEHAHRDALSLARLLHPTPAVAGWPTRAAMSAIRRLEHADRGLYAGAVGWVDGNGDGQWNVSIRCALLSGLEMSAWGGAGIVAESVAESELKETSAKLRTIVEGLGVDAEEAEHARW

SEQ ID NO: 93711 - protein, 352 aa, Corynebacterium matruchotii
  misc_feature (1)..(352): tr|C0E0B4|C0E0B4_9CORY Isochorismate synthase OS=Coryne bacterium matruchotii ATCC 33806 OX=566549 GN=CORMATOL_ 00414 PE=4 SV=1
MHSFIFTESGLTLTACGVAQEFDRISDANEYLHDGLSLIVGALPFHRADVPRLFAPREYKFSSEPVALESPDTLPAVASVDFLPPLSVHQQRIEQCIAEIQAGTLDKLVLSRAERFHFTGPVNPEAVLAGYMASAGTGFGYLVELADGGFFIGPSPEVLIKKQGREISSFPLAGTAMRSADPELDRAIAANLQASEKDLHEHSFVTAGIREALAPLCTQLEIPEIPLVMHTAHTWHLGTPIRGILRPDVDMSALDLAQLLHPTAAVNGHPAQIAAELLAKQEPDRGFYSGAVGWANGRGDGEWRVGIRSALISGDTVTAYAGGGIVADSVAADELRETHTKLGPIRSALGIL

SEQ ID NO: 93712 - protein, 367 aa, Corynebacterium minutissimum
  misc_feature (1)..(367): tr|A0A376CXM1|A0A376CXM1_9CORY Isochorismate synthase O S=Corynebacterium minutissimum OX=38301 GN=menF PE=4 SV =1
MCVHRPSTAPDFLLSRATGSVRTQGSVATFDEVDAAVSALRSGEAEMVVGALPFHKGEAAALTVPESIIREDGPLEPHAYYRSGALEARVTGFDPEPEEHLRRIEAAIATIEASKLDKVVLARAVDIEFLTPVDPLFVAARLIDLSSHRDGFIADLSPAGRPGAMLVGSSPEVLIKKQGSTVTAFPLAGSAPRHADRARDIVAGQDLHNSAKDLREHAFVVDHIRRILQPLCESLDAPSSPQLTSTNEMWHLGTPIAGTLNDPSITALELAELVYPTPAICGTPTEAAQALIETAETDRGFYAGAVGWCDSSGDGEYMVAIRCAEVAGDGLSARAWAGGGIVVDSDPEAELQETTAKLRTILRALNL

SEQ ID NO: 93713 - protein, 366 aa, Corynebacterium mustelae
  misc_feature (1)..(366): tr|A0A0G3GX68|A0A0G3GX68_9CORY Isochorismate synthase O S=Corynebacterium mustelae OX=571915 GN=menF PE=4 SV=1
MLTRPVTAPDFLLSRPHGSVRTQGSRQLFTNPWEAAAAIREKKCDFLVGALPFDIDDKCALRVPETIIRSDGPLEPPEYYRRGLPLNARLKMMMPSKTEHLNRVAAAVATIRNTALEKVVLARTVGVEFNTDDPIDPLEIAARLIHLSPERNAFLADISLDDAERRWIVGSSPEVLVKLSGNTVSCYPLAGSAARHPDPVKDEGLGQNLLRSEKDLWEHKLVVDHIVTALKPLCTSVNYSPTPELKKTAEMWHLATPITGTIATNTTALDVALRLHPTPAICGTPTEIARDLILQVETDRSFYAGAVGWCSSDGDGEYVVSIRCAETDGRFARAWAGGGLVASSIPDDEVAETDAKLRTIMRALGL

SEQ ID NO: 93714 - protein, 372 aa, Corynebacterium oculi
  misc_feature (1)..(372): tr|A0A0Q0YDX9|A0A0Q0YDX9_9CORY Isochorismate synthase D hbC OS=Corynebacterium oculi OX=1544416 GN=dhbC PE=4 SV =1
MSIPDYSFLFTGPAGTLSGVGRGATWHSVDQALGGLSDATPLVAGALPFHVTEPLALFSPVKFWFSPGAPALPEGEIPGVDSAVSEPDPEEHARRVQEATERIRSGEFEKIVLSRGVRYQLSAEIDARVLLARFLTGSGTGHGHLVDLHSAGTAYSGARLVGSSPELLLLKRGRYIESHPLAGTVARSADPVKDEALATELMLSAKNIEEHSYVTREIKRILEPWCSELEVPERPSLTATSHTWHLGTRIRGMVRENALSADGRLRGGAISALELAAALHPTPAVCGYPTAPTQSTLRAEEPQRGFYAGAVGWADDRGNGEWRVTIRGAVAQGSHVLAHAGGGIVADSDPQAEVQETQTKLGPVRAALGITE

SEQ ID NO: 93715 - protein, 393 aa, Corynebacterium otitidis
  misc_feature (1)..(393): tr|I7IX17|I7IX17_9CORY Isochorismate synthase OS=Coryne bacterium otitidis ATCC 51513 OX=883169 GN=menF PE=4 SV =1
MPTPRPSTAPDFLLSRSTGSVRTQGALKTFSSIGEAGRWLASNAPGRHSRPPAAGEPHEEPMIVGAIPFEIDKPAALTAPRSVIRSPGPLEPPAYYRAGASSPIEATITGLDPSKKRHLARVEAARRTIERTALDKVVLARAVTIAFARRVDPRALAARLIDASPTRDGFLADLSPAGGAYFGHTLVGSSPEVLIKKRGRTVTAFPLAGSAPRAADPADDRLAAGRLAASAKDLGEHRFVVEHLTSRLGPLCETLDVPDSPILTSTNELWHLATPIRGTLADEAYTALELVAAVHPTPAVCGTPTDAAMTVISGAETDRGFYGGAVGWADARGDGEFMVAIRCAEIDALGARARAWGGGGIVADSDPETELAETTTKLSTVLRCLGIDTDDVD

SEQ ID NO: 93716 - protein, 372 aa, Corynebacterium pelargi
  misc_feature (1)..(372): tr|A0A410W994|A0A410W994_9CORY Isochorismate synthase D hbC OS=Corynebacterium pelargi OX=1471400 GN=dhbC1 PE=4 SV=1
MCASSRPASAPDFLLSRAHGSIRTQGAKEQFNNIDDAIEALRRGEMVVGALAFRRDHACAFTVPENIIREDGPLEPHGYYRQGPGAQLHASLDALVPDEAEHAHRVAAAIETMRSTVLRKVVLARAVDVRFDPPVDPRLIAARLIDLSLHRDGFIVDLSPAGEDFVGNMLVGSSPEVLIKKQGSTVSAYPLAGSAPRAVDPIEDKKRGEALLRSTKDLDEHRFVVDHLRRKLSPLCSDLNIPDNPELTCTNEMWHLATPVVGTLKDAQMTALELAQIVHPTPAICGTPTDDAEELISFAEADRRFYAGAVGWAEGLDGEYMVAIRCAEVSGDGTRARAWAGGGIVEASDAQAEVAETSAKLRTIMKALGLSL

SEQ ID NO: 93717 - protein, 367 aa, Corynebacterium phoceense
  misc_feature (1)..(367): tr|A0A540R418|A0A540R418_9CORY Isochorismate synthase O S=Corynebacterium phoceense OX=1686286 GN=EJK80_12435 P E=4 SV=1
MFSSRPSTAPDFLLSRATGSVRTQGAQQTFDDLDAAVAALRSGDVEIIVGALPFERGARVALTVPESIIREDGPLEPHAHYRNRTLNARVTGFEPEPEEHLRRVEAAIATIQESKLDKVVLARAVDIEFSEPTDPRLVAARLIDMSYHRDGFIADLTPAGREGAMLVGSSPEVLIKRQGSTVSAFPLAGSAARQKDKARDILAGQDLARSPKDLREHAFVVDHLRRILSPLCETLDAPLTPQLMKTNEMWHLGTPVVGTLKDPHLTALELAALVHPTPAICGTPTDAAESVIQTAESDRGFYAGTVGWCDNSGDGEYMVAIRCAEVSGDGLTARAWAGGGIVSDSDANAELEETSAKLRTILRALGL

SEQ ID NO: 93718 - protein, 371 aa, Corynebacterium pilosum
  misc_feature (1)..(371): tr|A0A376CQ14|A0A376CQ14_9CORY Isochorismate synthase O S=Corynebacterium pilosum OX=35756 GN=dhbC PE=4 SV=1
MCANRPSTAPDFLLSRAHGSVRTQGCQHAFTVTWDAIEALNKGEVEMVVGALPFDKDAPAALTVPVNIIRESGTLEPHPYYRVGEGSSLSASVYGFDPEPSEHLRRVEAAVETIRSSLLEKVVLARAVDIEFDPPVDPRLVAARLIDLSYTRDGFIADLTPSGKRGHMFVGSSPEVLVRRKGNRVTSYPLAGSAPRNFYDADADAAAGQALANSAKDHEEHAYVVEHIRRILEPLCSDLQIAERPQLDRTNEMWHLATPIEGVLKDPAPNALELASLLYPTPAVCGTPSDAAEALIVTAESDRSFYAGTVGWCDASGDGEYMVAIRCAEVNEAGTMARAWAGGGLVADSDPETELEETTAKLRTIMRSLGL

SEQ ID NO: 93719 - protein, 364 aa, Corynebacterium propinquum
  misc_feature (1)..(364): tr|A0A433FGB9|A0A433FGB9_9CORY Isochorismate synthase O S=Corynebacterium propinquum OX=43769 GN=D8M20_08975 PE =4 SV=1
MPQFVFNHATASVTATGIARRFASVDAALEFAHRGEHALVGAMPYHPGEPAALFIPSRLEHSDAPFLGAQAQSTKQLREVRQLHKTSYLPSLAEHTARVAQMRQRIRAGELDKIVLSRREVYQFAGAIDPWQVFAELTRNSTDCYSHFVDLGAGRYFLGNSPEVLIRKTGSVISSFPLAGSVRRQADPDKDQQVAQQLAQSSKDQHEHAFVTEGIREVLAPLCTSLTVPDEPSLMQTSHTWHLGTRILGELRDPHLSVVDLARMLHPTAAVNGAPASVAQSILAADEPDRGLYAGTVGWANENGDGEWRVAIRSALLDGDTATAYAGGGIVADSDPDTELEETTFKLGPVRAALGISGERTHGA

SEQ ID NO: 93720 - protein, 426 aa, Corynebacterium provencense
  misc_feature (1)..(426): tr|A0A2Z3YM23|A0A2Z3YM23_9CORY Isochorismate synthase D hbC OS=Corynebacterium provencense OX=1737425 GN=dhbC_1 PE=4 SV=1
MPDNSRSDLTGPDPRTAGHHTSGPGGTLTDTQLSDTQLPAAHRADFTFRRGVSGISVQARDLAPVDDWEPGLDVVGALPFDHRDGTPERLYTSGVPLTPGSLTAGAAGDRTASGVHATTVDTGRGDFFTAGVRTLLKSLESDGDLRKVVLARSVRAELDRVPDWESLLRRLSSRNRSAWVFSVPLDPTSGDRAFLGASPELLVSRRGDRIVSHPLAGSVPRSPDPDEDRRRAESLTRSSKDHTEHAYVVDMIASVLAPLCTRLDVPRHPELLATDKMWHLGTRITGKLAGDGTDALSLARLLHPTPAVGGVPTGPAVDRIRELEPVGRGYFAGTAGWCDARGDGDWVVSIRSAEFTGNRVTAWAGAGIVEGSDPDSEYTETGAKLRTVLEGLGVLPAEPEAPQASTITGTARTAGTAGTGEDAGGH

SEQ ID NO: 93721 - protein, 365 aa, Corynebacterium pseudodiphtheriticum
  misc_feature (1)..(365): tr|A0A3S0WJD9|A0A3S0WJD9_9CORY Isochorismate synthase O S=Corynebacterium pseudodiphtheriticum OX=37637 GN=D8M3 0_03265 PE=4 SV=1
MQSSRPATAPDFLLSRAHGSVRTQGCVDTYTDIDQAIQALADGQHEMIVGALPFNPNDRAALTVPESIIREDGPLEPPAFYRQGELRARISSVDPEPQEHLRRVEAAIDTIVSSRLEKVVLARAVDFEFLADVDPRLVAARLIDNSAHRDGFIADLSPAGREGHMLVGSSPEVLVKRQGSTVSAIPMAGSAARSADPVEDENARFHLQNSTKDLHEHGFVVEHLRTALSPLCEQLSIPAKPQLIKTNEMWHLATPISGQLKQPQLSALDLAARIHPTPAICGTPTAAADHLIHTAESARGFYAGAVGWCDSTGDGEYLVAIRCAEIWGRQGRTWAGGGIVADSDPEQELAETTAKLQTILRSLGL

SEQ ID NO: 93722 - protein, 367 aa, Corynebacterium pseudogenitalium
  misc_feature (1)..(367): tr|E2S458|E2S458_9CORY Isochorismate synthase OS=Coryne bacterium pseudogenitalium ATCC 33035 OX=525264 GN=HMPR EF0305_11310 PE=4 SV=1
MHEDRPSTAPDFLLSRATGSVRTQGARHTFNDTDAAISALRSKDVDMVVGAIPFDSDTPAALTVPEAIIREEGPLEPHAYYRNKSLNSRVVGFDPEPEEHLRRVEAAIGTIETSKLDKVVLARAVDIEFPEAIDPRLVAARLIDLSANRDGFIADLSPAGRPGAMLVGSSPEVLVKRQGSTVSGFPLAGSSPRRTSAAEDHIAGQDLLHSAKDLHEHSFVVEHLRRVLSPLCERLDIPDTPQLISTNEMWHLGTPISGTLKDKDLTALELALAAHPTPAICGTPAEAAQALIETAETDRGFYAGAVGWCDSSGDGEYMVAIRCAEVAGDGLSARAWAGGGIVGDSDAHAELEETTAKLRTILKALSL

SEQ ID NO: 93723 - protein, 404 aa, Corynebacterium pseudopelargi
  misc_feature (1)..(404): tr|A0A3G6IZB1|A0A3G6IZB1_9CORY Isochorismate synthase D hbC OS=Corynebacterium pseudopelargi OX=2080757 GN=dhbC 2 PE=4 SV=1
MNHSHSTAQHPSAIFSSATETLQATGIAQTFSSVSAAAQALHTQAVEIIVGALPFHEADPVCLFRPKRHSIRQQPLTLSSPALGPSEHDAAVSISFNHNSGEHHGRVARMVEQLKQGIAQKVVLSRQMRVDIASGEYADLVADPLWLLGRFLQGSATGDGHLLRLDAAGKRYQGAYFVGSSPELLIAKRGRYIESFPLAGTIARSADPVQDQARATELQLSAKDLHEHAFVTHDIAETLGPLCTRLDIPARPSISATSHTWHLGTKITGELRDDAISSLELAALLHPTPAVSGYPQPEARHILSEEEPERGFYAGAVGWSDAQGNGQWRVGIRSATMLPPTMDPASNASEHLRILASAGGGIVQHSDPAAEVQETQSKFGPLIQALSLSPSLIKAAEYELELQR

SEQ ID NO: 93724 - protein, 372 aa, Corynebacterium pseudotuberculosis
  misc_feature (1)..(372): tr|A0A4U9QSG0|A0A4U9QSG0_CORPS Menaquinone-specific iso chorismate synthase OS=Corynebacterium pseudotuberculos is OX=1719 GN=menF PE=4 SV=1
MCAHRPSTAPDFLLSRTHGSIRTQGVQEAFSDPWTAIEALHSGTADLVVGALPFRRDHPCALTVPEKVIWEDGPLEPHAYYRYGEGSVLHAYLDALVPELDEHRDRVIAAIETLKASRLDKVVLARAVDMRFDPPVDPRLIAARLIDLSYNRDGFIADLSPAGEDFAGAMLVGSSPEVLIKKQGSTISAYPLAGSAPRNADKLLDARAGEELRRSPKDLVEHSYVVDHLRTLLAPLCSSLEIPQHPELTRTNEMWHLATPVVGTLKDPALTALELALVVHPTPAICGTPTDAAEEVIGIAEGDRRFYSGAVGWSNAFGDGEYMVAIRCAEVNGKGTSARAWAGGGIVADSDADAEVAETSAKLRTIMRALGL

SEQ ID NO: 93725 - protein, 453 aa, Corynebacterium resistens
  misc_feature (1)..(453): tr|F8DYW8|F8DYW8_CORRG Isochorismate synthase OS=Coryne bacterium resistens (strain DSM 45100 / JCM 12819 / GTC 2026) OX=662755 GN=menF PE=4 SV=1
MGLGGGATLRLRQQSGHEVRQRAGMRLGGGATLRLRQQSDGGWKNGPKARRNSAQASKSVLPDSISRLSDMTAEHQRPATAPDFLLSRPHSSIRTQGRKATYPDPFEAAQALHDGQVDLLVGAIPFKTSFRAALSQPDSVIVSEGPLEPPAFFRGQNAADKLRVESISPVTSLEEHKAAVAAAIATIRQTRLEKVVLARAVDVTFEDEPDPLLIAARLIDLSANRDGFAVDLSATGRDEDQGATFVGSSPEMLVRREGRTVTAFPLAGSTPRTGVASIDDQAARDLLMSGKNQSEHKLVVDHYRHVLEPLCDNLDIPTKPDIHETTEVIHLGTAIRGELKTDCAHYSALDLALMLHPTPAIGGTPTDDAIGIIEEVEQPREFYAGTVGWCDSAGDGEYMVAIRCCVIEGVMARAWAGGGIVADSDPEEEAEETTAKLQTALRALNVPAAMRHV

SEQ ID NO: 93726 - protein, 367 aa, Corynebacterium segmentosum
  misc_feature (1)..(367): tr|A0A3S4VMV4|A0A3S4VMV4_9CORY Isochorismate synthase O S=Corynebacterium segmentosum OX=43990 GN=menF PE=4 SV= 1
MHEDRPSTAPDFLLSRATGSVRTQGARATFTSAEAAVDSLRRGDAEMVVGAIPFDSDTPAALTVPEFIIREDGPLEPHAFYRNQSLNSRVVGFDPEPEEHLRRVEAAIGTIETSKLEKVVLARAVDIEFAAPIDPRLVAARLIDLSVNRDGFIADLSPAGRPGAMLVGSSPEVLIKRQGSTVSAFPLAGSTPRRANKAADHIASQDLLHSAKDLLEHSFVVEHLRRILEALCSSLDIPETPQLIHTSEMWHLGTPVTGTLRDKELTALELAEVVHPTPAICGTPTEAAQALIETAETDRGFYAGTVGWCDSSGDGEYMVAIRCAEVAGDGLSARAWAGGGVVGASNAQAELEETTAKLQTILRALSL

SEQ ID NO: 93727 - protein, 367 aa, Corynebacterium simulans
  misc_feature (1)..(367): tr|A0A127NR36|A0A127NR36_9CORY Isochorismate synthase f amily protein OS=Corynebacterium simulans OX=146827 GN= WM42_0220 PE=4 SV=1
MHENRPATAPDFLLSRATGSVRTQGSQRTFTDVEKAIAALRDKSAEMIVGALPFNTDDPAALTEPASIIREDGPLEPPAYYRQGTLNARVTGFDPEPEEHLRRVDAAIATIQTSKLDKVVLARAVDLEFTEAVDPRLVAARLIDISANRDGFIADLTPAGREGATLVGASPEVLVKKQGSTVTAFPLAGSAPRQADKARDHLAGQDLLRSAKDLHEHSFVVDHLRRILSPLCTTLDAPSTPELINTNEMWHLGTPIAGTLKEPELTALELAMLVHPTPAICGTPTEAAQALIETAETDRGFYAGTVGWCDNNGDGEYMVAIRCAEVAGNGLSARAWAGGGIVESSNSQEELAETTAKLRTILRALGL

SEQ ID NO: 93728 - protein, 367 aa, Corynebacterium singulare
  misc_feature (1)..(367): tr|A0A0B6F2V0|A0A0B6F2V0_9CORY Isochorismate synthase O S=Corynebacterium singulare OX=161899 GN=menF PE=4 SV=1
MCDRRPASAPDFLLSRATGSVRTQGTVATFTEVDAAVTALRNGEADMVVGALPFHKGEAAALTVPESIIREEGPLEPHAYYRSGALEARVTGFDPEPEEHLRRIEAAIATIEASKLDKVVLARAVDIEFLNPVDPLLVAARLIDLSSHRDGFIADLSPAGRLGAMLVGSSPEVLIKKQGSTVTAFPLAGSAPRHADRARDIVAGQDLHNSGKDLREHAFVVDHIRRILEPLCESLDAPTSPELTSTNEMWHLGTPIAGTLKDPAITALELAELVYPTPAICGTPTEAAQALIETAETDRGFYAGAVGWCDSSGDGEYMVAIRCAEVAGDGLSARAWAGGGIVVDSEPETELQETTAKLRTILRALNL

SEQ ID NO: 93729 - protein, 372 aa, Corynebacterium sp.
  misc_feature (1)..(372): tr|A0A5B8NUZ2|A0A5B8NUZ2_9CORY Isochorismate synthase O S=Corynebacterium sp. sy039 OX=2599641 GN=FQV43_08640 P E=4 SV=1
MSHYRPDSAPDFLLSRAHGSVRTQGAKETFDDLDAAIKKLHDNPEEMVVGALPFRRDHKPALTVPQSIIREPGALEPHSYYRVGAGAQLNASLLSLDPSLEEHTDRIAAAIGTIEDSQLKKVVLARSVEIGFDPAVDPRLIAAKLIDLSAARDGFIADLSPAGEDFVGAMLVGSSPEVLVRKQGATIRSFPLAGSAARHSDPHLDQAQAELLLNSSKDNDEHAFVVDHLERLLRPLCSTLEIPAQPQLIRTNEVWHLATPIVGKLKNEHTTALELAAWLHPTPAICGTPTDAAEEVIALAEGDRRFYAGAVGWADGQGNGEYMVAIRCAEVSACGTKARAWAGGGIVAQSRPEDEVAETSAKLKTIMTALGL

SEQ ID NO: 93730 - protein, 367 aa, Corynebacterium striatum
  misc_feature (1)..(367): tr|C2CMU2|C2CMU2_CORST Isochorismate synthase OS=Coryne bacterium striatum ATCC 6940 OX=525268 GN=dhbC PE=4 SV= 1
MHANRPSTAPDFLLSRATGSVRTQGAKKTFTDTDAAINALRTGNVEMIVGALPFNPDEAVALTEPASIIREDGPLEPHAYYRQGTLNARVTGFDPEPEEHLRRVDAAIATIQSSKLDKVVLARGVDIEFAAPVDPRFVAARLIDLSANRDGFIADLSPAGRPGAMLVGASPEVLVKKQGSTVTAFPLAGSAPRQADKARDHLAGQDLLRSAKDLHEHAFVVDHLRRILSPLCTTLDAPTTPELINTNEMWHLGTPIAGTLKEPALTALELAMLVHPTPAICGTPTEAAQALIETAESDRGFYAGAVGWCDSSGDGEYMVAIRCAEVAGDGLSARAWAGGGIVESSNSQEELAETSAKLRTILKALGL

SEQ ID NO: 93731 - protein, 370 aa, Corynebacterium tapiri
  misc_feature (1)..(370): tr|A0A5C4U7E2|A0A5C4U7E2_9CORY Isochorismate synthase O S=Corynebacterium tapiri OX=1448266 GN=FHE74_01835 PE=4 SV=1
MCAHRPSTAPDFLLSRATGSVRTQGSLATYTDPWEAADALSSGTIDMVVGALPFERSADAALAVPESIIREPGPLEPHSYYRFGPGAQLSARIAGVDPEEHEHLRRIEAALATIQTSKLDKVVLARAVDIAFDPPVDPLLVAARLIDRSSNKDGFIADLSPALEPGTMLVGSSPEVLVKRTGMTVTCYPLAGSAPRQQDPAQDRAVAETLAASTKDLSEHHFVVEHLRQALSPLCDYLEAPDVPELTHTNEMWHLATPIVGKLKNPRTSALELALRLYPTPAVCGTPTDSAEALINTAESDRSFYAGAVGWADSSGDGEYMVAIRCAEVAGDGTHARTWAGGGIVAESDAEAELAETSAKLRTILKALDL

SEQ ID NO: 93732 - protein, 370 aa, Corynebacterium testudinoris
  misc_feature (1)..(370): tr|A0A0G3H5C3|A0A0G3H5C3_9CORY Isochorismate synthase O S=Corynebacterium testudinoris OX=136857 GN=menF PE=4 S V=1
MCAHRPASAPDFLLSRAHGSVRTQGCVESFTDPWAAIDALKAGRVPIVVGALPFDRSAPAALTVPETVIREDGPLEPHAYYRQGPGSLMSATFAGVDPEPEEHLRRVEAAISTIQASKLEKVVLARAVDITFDPPVDPLLVAARLIDNSVNRDGFIADLSPAGVPGAMLVGSSPEVLIKRQGSTVSAYPLAGSAARHPDPATDTLIGKRLAASAKNLQEHAYVVEHLRSTLAPFCTRLDIAALPEVTMTNEMWHLATPIVGTLAEPALSALELALHAHPTPAVCGTPTDAAEALIHTAESDRSFYAGAVGWCDDSGDGEYMVAIRCAEVAGDGRSARAWAGGGIVADSDAEEELEETTAKLRTILRSLGL

SEQ ID NO: 93733 - protein, 321 aa, Corynebacterium tuberculostearicum
  misc_feature (1)..(321): tr|C6R8S1|C6R8S1_9CORY Isochorismate synthase OS=Coryne bacterium tuberculostearicum SK141 OX=553206 GN=CORTU00 01_2030 PE=4 SV=1
MVVGAIPFDSDTPAALTVPEAIIREEGPLEPHAYYRNKSLNSRVVGFDPEPEEHLRRVEAAIGTIETSKLDKVVLARAVDIEFPEAIDPRLVAARLIDLSANRDGFIADLSPAGRPGAMLVGSSPEVLVKRQGSTVSAFPLAGSSPRRASAAEDHIAGQDLLHSAKDLHEHSFVVEHLRRVLSPLCERLDIPDAPQLISTNEMWHLGTPISGTLKDKDLTALELALAAHPTPAICGTPAEAAQALIETAETDRGFYAGAVGWCDSSGDGEYMVAIRCAEVAGDGLSARAWAGGGIVGDSDAQAELEETTAKLRTILKALSL

SEQ ID NO: 93734 - protein, 367 aa, Corynebacterium ulcerans
  misc_feature (1)..(367): tr|A0A448GAU1|A0A448GAU1_CORUL Isochorismate synthase O S=Corynebacterium ulcerans OX=65058 GN=menF PE=4 SV=1
MCVHRPSTAPDFLLSRATGSVRTQGSVATFDEVDAAVSALRSGEAEMVVGALPFHKGEAAALTVPESIIREDGPLEPHAYYRSGALEARVTGFDPEPEEHLRRIEAAIATIEASKLGKVVLARAVDIEFLTPVDPLFVAARLIDLSSHRDGFIADLSPAGRPGAMLVGSSPEVLIKKQGSTVTAFPLAGSAPRHADRARDIVAGQDLHNSAKDLREHAFVVDHIRRILQPLCESLDAPTSPQLTSTNEMWHLGTPIAGTLNDPSITALELAELVYPTPAICGTPTEAAQALIETAETDRGFYAGAVGWCDSSGDGEYMVAIRCAEVAGDGLSARAWAGGGIVVDSEPEAELQETTAKLRTILRALNL

SEQ ID NO: 93735 - protein, 380 aa, Corynebacterium urealyticum
  misc_feature (1)..(380): tr|B1VG39|B1VG39_CORU7 Putative isochorismate synthase OS=Corynebacterium urealyticum (strain ATCC 43042 / DSM 7109) OX=504474 GN=cu0768 PE=4 SV=1
MDSDKRPVTAPDFLLSRPHHSIRTQGRKATFPDPFEASTALREGTAELLVGAIPFNTGFRAALMEPEKVVTFDGPLEPPAYFRGREAAESLEAVEVTVATTKEEHQARVAAAIQTIRRTSLEKVVLARVADVYFADTIDPLLVAARFIDLSANRDGYAVDLSATGRKEDQGAMFAGSSPEMLVSRKGRTVRAFPLAGSAPRTGVAERDDATAEELRSSEKNLVEHALVVEHYRRILEPLCSELDIPTEPLIHETTEMIHLGTPIVGTLADAAYSALDLALMLHPTPAIGGTPTDEAVGIIESVEEPREFYAGAVGWCDADGDGEWMVAIRCACVEGDSARVWAGGGIVADSDPHEEAEETTAKLQTALRALNVPAAMRDV

SEQ ID NO: 93736 - protein, 370 aa, Corynebacterium uterequi
  misc_feature (1)..(370): tr|A0A0G3HE04|A0A0G3HE04_9CORY Isochorismate synthase O S=Corynebacterium uterequi OX=1072256 GN=menF PE=4 SV=1
MSARRPTTAPDFLLSRAHGSVRTQGARKTFTDPWAAADALHDGDVPMVVGALPFERSAPAALTVPKKIIRESGPLEPHSYYRFGPGARLSARIEHVDPAEHEHLRRIEAAIETIRNSKLDKVVLARAVNIAFDPPVDPLLVAARLIDRSNNRDGFIADLTPAGLDGHMLVGSSPEVLVRRHGSVISAYPLAGSAPRHEDPARDAEAGYLLAESAKDLSEHQYVVEHLRAALGPLCSRLDAPAVPELTKTNEMWHLATPIVGELANPATTALELALRIYPTPAVCGTPTDAAEALIQTAESDRSFYAGAVGWCDNTGDGEYMVAIRCAEVAGDGRSARAWAGGGIVADSDADEELAETSAKLRTILRSLDL

SEQ ID NO: 93737 - protein, 380 aa, Corynebacterium variabile
  misc_feature (1)..(380): tr|A0A0X2NQA3|A0A0X2NQA3_9CORY Isochorismate synthase O S=Corynebacterium variabile OX=1727 GN=CVAR292_02239 PE =4 SV=1
MTYLDRPATAPDFLLSRSSGSLRTRGSRANWPDPFEAATALRNGDAGLIVGAVPFDTANRAALTVPEVITESEGPLEPPAHYRGLDAGQKAEVLSVTPLTTSEEHQTTAAATIATIQNTTLEKVVLARAVDVEFAEEVDPLLIAARMIDLSARRDGFAVDLGATGRHDDKGTLLVGSSPELLIRRRGTTVEALPLAGSAARLRDRDADVTVGRMLQDSVKDLSEHRWVTDHYERVLSQVCTELSVPDRPELIQTNEMWHLGTRIQGTVPEDGPSALDLALMLHPTPAVGGYPTHEALGIIDEVEEPRDFYAGFVGWCRADGDGEYMVSIRCAEVAGAGARAWAGGGIVANSSAAAETAETTAKLQTALRALNVPAALRAV

SEQ ID NO: 93738 - protein, 385 aa, Corynebacterium xerosis
  misc_feature (1)..(385): tr|A0A494RPA8|A0A494RPA8_9CORY Isochorismate synthase O S=Corynebacterium xerosis OX=1725 GN=D4R08_04250 PE=4 S V=1
MTSEGDECVRGRRGPFDGRPATAPDFLLSRSHGSVRTQGSLATYSDPWLAAERLRRGEHQMVVGAIPFNSERPAALTVPREIIRSEQPLEPPAHYRWNSPEIKARIVGHDPAPEEHLERLDAAIRTIKVSGMDKVVLARAIDLAIDPAIDPLQLSSRLIDGSPNRDGFVADLGPAGGRFTGRMLIGSSPEMLVRRRGRIVEAFPLAGSAPRSRDRAADEAAAAKLMASRKNNEEHEFVVDDIADNLAPLCSHLDVPHEPQLLSTSEMWHLGTFIRGELKDPVISALDLALLVHPTPAICGTPTESAMSVIEAIESDRGFYAGCVGWCDSEGDGEFVVSIRCAEIDAAGTEARLWAGGGIVADSNPEEELAETTAKLRTVLRAFGL

SEQ ID NO: 93739 - protein, 454 aa, Cosenzaea myxofaciens
  misc_feature (1)..(454): tr|A0A198GG52|A0A198GG52_9GAMM Isochorismate synthase M enF OS=Cosenzaea myxofaciens ATCC 19692 OX=1354337 GN=m enF PE=3 SV=1
MENVSSVFLTLCEEVKKINLTASDELLHLTIALPSEISFSLLAWLAAQTHYPQFYWQHRDETEEVAVCGQLCCFNHIRDAQQFLISKKKKFNDIENVRFWGLNAWDTIIPGHIDKRYGDDAYLFLPRIEIRRHQQHCTVHLNLLGNDDKESVLDFLNTLNNEFNIEPLSSSVISVEHSLSQEQWKNYLNIALDEINQGLFEKVVPARATCLTLESPLKAIQFMNASRDVNHKCYHYMLAFSPTDAFMGSSPERLYLRDNFMLYTEALAGTVASSDNDEQATKLANWLMNDTKNQHENLVVVDDICQRLQGGIEGIDVSPADVIRLRKVQHLRRYIHGKLIDNNDVDCLSRLQPTAAVCGLPRTIAREFIRQHEPFERRWYAGSAGFLGLPRTEFAVSLRCGELHDNTLTLYAGAGVVAGSDPEQEWVEIENKAAGLRTLLQEKQSVIEKEFVIE

SEQ ID NO: 93740 - protein, 366 aa, Criblamydia sequanensis
  misc_feature (1)..(366): tr|A0A090DY59|A0A090DY59_9BACT Putative menaquinone-spe cific isochorismate synthase OS=Criblamydia sequanensis CRIB-18 OX=1437425 GN=menF PE=4 SV=1
MAPIRNKPYPAFDMIEAFLNNGSLLQFDKKRLLIGWGEKIFRDNPSYSSEKPTFYFPDFFLEDETKATFNHEFNSLIEVDELTESLNVGSESYDYKWETEGELLFKETVDKHNECFQTNRLKKVVPYVFEAAKWQLKKERIGQWIRSLIKESKPFPLSLYGTWDEHFGLLGATPEILFNLDEDKKELKTIALAGTLESTINEKVLIDQKTFQEHQFVIEGIREDLSPFGKVEIGEREQADFGNLLHFFTPIILKWNTFPSFFEMIRALHPTPALGAYPKFEGFQWLKKYNEALPRYRFGAPAGFSFPAMNKYCCYVAIRGMQWDDKEVRIGAGCGIVKGSKRDEEWKEIKLKMSMIKKLFQIPIKP

SEQ ID NO: 93741 - protein, 433 aa, Cricetibacter osteomyelitidis
  misc_feature (1)..(433): tr|A0A4R2T1K1|A0A4R2T1K1_9PAST Isochorismate synthase M enF OS=Cricetibacter osteomyelitidis OX=1521931 GN=menF PE=3 SV=1
MNALQTLRVQLTEQLNALQSHSSQNAISVLKAQIAVNDMNWLAWLKAQQSYPQFYWRHRDNMQTVISVGKVRSFSQLNSADYFIQQHSTTLVGGLTFNGECQFYLPRLLLSAEPKSVTAYLTLDHQADPIQEQQAILAVLENLAKSTALSAVSQSIELMKQSADQTLWCGWVKKALNAIAHTDLTKVVLANETEFVTQSLNSKDFLAESEKQNAGCYHFLWAENPYTAFVGSTPERLYARNRSHLQTEALAGTAFMTADEQENQRLAQWLLNDEKNLYENQLVVDDICQNLHSFVTEINIQQVELKQLRQVQHLRRRIFAELAEQYSDQHCLMAIHPTAAVSGLPQQSAMQFLQNTENFDRSWYAGTLGFMNRQAAEFCVTIRSAFIENGEQSKIRVFAGAGIVAGSIPLLEWQEIERKAAGLVSLLQSKEIE

SEQ ID NO: 93742 - protein, 487 aa, Crinalium epipsammum
  misc_feature (1)..(487): tr|K9W4F1|K9W4F1_9CYAN Isochorismate synthase OS=Crinal ium epipsammum PCC 9333 OX=1173022 GN=Cri9333_3865 PE=4 SV=1
MINKMQTSLLNFSAMTVTPYRNPQLIECKDLYQFLSACKQTAQQKDQTKIISISLEMPPVDPLAVMAAMAKPGQLNFYFEQAGHEVAIAAIDAVVSLKVAGSSRFEQAQHFIKSCFSSTMIAGADDLALTGPHFFCNFTFFDEPLNGDLTFPPATIFLPRLQFSKYKNKGILVLNIEINQLKNHEFLFKEILSKIEIIKNSSQIKSNHIYNSLENYCNLSFNNINKFKSSVTSALESIRCNKLNKIVLAHAVDVKSPAPFKIIDSLDNLRQRYPGCYIFSTSNSKGQTFIGASPERLISIKNQQLFTDSLAGSAPRGTTAIEDAEFGDRLLSSEKERREHLVVLDFITQRLTKLGLAPVSPQLPQLLKLANIQHLWTPIQARMPSCVHPLEIVAELHPTPAVAGLPRKIACQQIRTFELFERSLYAAPIGWVDHQGNSEFIVGIRSALIDGDRARLYAGAGIVAGSEPDKELAEIQLKLQALLKALV

SEQ ID NO: 93743 - protein, 485 aa, Crocosphaera watsonii
  misc_feature (1)..(485): tr|T2IA07|T2IA07_CROWT Isochorismate synthase @ Menaqui none-specific isochorismate synthase OS=Crocosphaera wa tsonii WH 8502 OX=423474 GN=CWATWH8502_3379 PE=4 SV=1
MSVATPIIPETTKLRYNQHNLEQLFLSHQATLEGQNQSTIVSLYQIIPEVDTLSVLECLTSENNSDLSQNKTYFYWENKANREAILGYGMTESCQLNIESRFRDSKKFVNNCFQKLTKVNHDDSSTSFPHVFCGFTFFSETNQLKFPFPSAFAFLPKLEIIKQKEKQILILNLLIDYQTDIKKLVHQTMANLKLITKIKTYQNLDKPIKIPVNLMNKYEIGQGFKSSVASVLESIEANDFEKLVLASALDLSSFHDISIINCLRNLRNNHPDCYIFAINNGENNCFLGASPERLISLKNNQLLSDALAGSIARGNTKREDYYLAQHLLKSSKERREHQVVIEFIVQRLISLGLSPQISPLKVLKLSNIQHLWTPIYTQLSPNIHPLEVVAELHPTPAVSGFPTEVTCQEIKRYESFERGFYAAPLGWIDYNGNSEFIVGIRSALISGNQARLYAGAGIVEGSEPDKELAEIQLKFQGLLKALSYC

SEQ ID NO: 93744 - protein, 428 aa, Cronobacter condimenti
  misc_feature (1)..(428): tr|K7ZYT0|K7ZYT0_9ENTR Isochorismate synthase MenF OS=C ronobacter condimenti 1330 OX=1073999 GN=menF PE=3 SV=1
MNTFAAALAQAEEALNDAPDSPGVYRRAFAFCAYDHDFLAWLSAQAAFPQFYWRSRDGDEEVAALGAAQAFASLDEAQAFLRQHEDEPDLRACGLNAFDPAHGFLFLPRLALHREGERASLVVTLFSEHSRRQAAEALQRNLRSLQTPRLLPPGAPPLVSRCDCPQAKAWTRLVARASEAIARGDIAKVVLARATDLRFASPPDAAALMAASREANHYCYHFYLAFSARDVFLGSTPERLWRREGCALATEALAGTVENHPDDAQASARAAWLQDDDKNRRENALVVDDICARLQAIARDVHIQVAQVVRLRRVQHLKRVIFGRLLRADDAACLRQLQPTAAVAGLPREAARRFITDNEPFDRAWYAGSAGYLSKEKTEFCVSLRAARITDDTVRLYAGAGLVAGSEAALEWQEIENKAAALLSLLTG

SEQ ID NO: 93745 - protein, 388 aa, Cronobacter dublinensis
  misc_feature (1)..(388): tr|K8AJ32|K8AJ32_9ENTR Isochorismate synthase [enteroba ctin] siderophore OS=Cronobacter dublinensis 1210 OX=12 08656 GN=BN134_1400 PE=4 SV=1
MDTSLAGECRKATASLSSDSFFFMSPYHSFTTRGCFARIDTPAVDGEARHGVFQTALRDAFDRARRSGIARPMVVGAIPFDTRQPSALFIPESRSDFTPAGYALPERAAAPRVKSRTELPEQEAFMAMVARAAALTDTPEVSKIVLSRLIDLTTDTPPDSLALLARLVAQNPASFNFHVPLPDGGTLLGASPELLLRKDGNTFSSLPLAGSARRHADAREDNAAGQALLCSAKDRHEHELVTQAMRDLLVPRSHRLAMPGAPELITTPTLWHLATPVEGETRFADDNALSLACLLHPTPALSGFPHEAAKASIAELEPFDRELFGGIVGWCDAEGNGEWVVTIRCARLCGNQVRLFAGAGIVPASDPLSEWRETGTKLSTMLHVLGLH

SEQ ID NO: 93746 - protein, 429 aa, Cronobacter malonaticus
  misc_feature (1)..(429): tr|V5TWM1|V5TWM1_9ENTR Isochorismate synthase MenF OS=C ronobacter malonaticus OX=413503 GN=menF PE=3 SV=1
MNTLAAAQALAEKALADVPDIPGLWRCAFEFSPESNDFLAWLGAQPGYPQFYWRSREGHEEAATLGAACTFLSLNEAQAFLRQYADTPGLRAWGLNAFDPQTGLFFIPRLELRREGDRAWLMVNLYSACSQRKAAQALKPLIHNLQPARQTLLQPAPRRVSRCDTPQAQQWAQLVGAATHAIERGDFAKVVLARATDLRFVAPPDATALMAASREANHHCYHFYLAFSAREVFLGSTPERLWRRNGLALDTEALAGTVENLSDDGLAQARAIWLLNDDKNRRENALVVEDIRERLQAIAHSITARLPEVVRLRRVQHLRCAISARLFAPDDGACLHQLQPTAAVAGLPREAARRFIADHEPFDREWYAGSAGFLSLESAEFCVSLRSARLKDKTIRIYAGAGLVAGSQAALEWQEIENKAEALLTLLTD

SEQ ID NO: 93747 - protein, 148 aa, Cronobacter sakazakii
  misc_feature (1)..(148): tr|K8CSL6|K8CSL6_CROSK Isochorismate synthase [enteroba ctin] siderophore OS=Cronobacter sakazakii 701 OX=12086 63 GN=BN129_2192 PE=4 SV=1
MTQAMRDVLAPRSQRLAMPGAPELITTPTLWHLATPVEGETRFADDNALSLACLLHPTPALSGYPHEAAKAYIAELEPFDRELFGGIVGWCDADGNGEWAVTIRCARLRENQVRLFAGAGIVPASDPASEWRETGVKLSTMLHVLGLH

SEQ ID NO: 93748 - protein, 429 aa, Cronobacter turicensis
  misc_feature (1)..(429): tr|A0A2T7B0S0|A0A2T7B0S0_9ENTR Isochorismate synthase M enF OS=Cronobacter turicensis OX=413502 GN=menF PE=3 SV =1
MNTLAAAQALAEKALADAPDTPGLWRCAFEFSPESCDFLAWLGAQPGFPQFYWRSREGHEEAATLGAACTFSSLDEAQAFLRQHADTPGLRAWGLNAFDPQNGLFFVPRLELRREENRAWLIVTIYSACSQQKAAQALKPLIHNLQPARQTLLQRPPRRVSRCDVPQAQPWTELVGAATSAIDRGDIAKVVLARATDLRFIAPPDATALMAASREANHHCYHFYLAFSAREAFLGSTPERLWRRRGLALDTEALAGTVENLPDDDQAQARAAWLLADDKNQRENTLVVEDIRERLQAIAHSISARLPEVVRLRRVQHLKCAITARLYAPDDAACLRQLQPTAAVAGLPREAARRFIAEHEPFDREWYAGSAGYLSLEQSEFCVSLRSARLKDETIRVYAGAGLVAGSQAALEWQEIENKAAALLTLLAQ

SEQ ID NO: 93749 - protein, 388 aa, Cronobacter universalis
  misc_feature (1)..(388): tr|A0A376ERY7|A0A376ERY7_9ENTR Isochorismate synthase e ntC OS=Cronobacter universalis NCTC 9529 OX=1074000 GN= entC PE=4 SV=1
MDTSLAGERCDAAASLSSDSFFFMSPYRSFTTRGCFTRLETPAADGAERHGVFQTALRDAFDRARRQGIARPIVVGAIPFDTRKPSALFIPESYSDTARGGYSLIDNSAAPRVIRREALPDEATFRAMVARAAALTATPAVSKIVLSRLIDITTGQAPDSLALLARLVAQNPASFNFHVPLPDGGALLGASPELLLRKDGDTFSSLPLAGSARRHADAAQDKSAGQALLCSAKDRHEHELVTQAMRDVLAPRSQRLAMPGAPELITTPTLWHLATPVEGETRFADDNALSLACLLHPTPALSGYPHEAAKAYIAELEPFDRELFGGIVGWCDADGNGEWAVTIRCARLRENQVRLFAGAGIVPASDPASEWRETGVKLSTMLHVLGLH

SEQ ID NO: 93750 - protein, 379 aa, Cryobacterium flavum
  misc_feature (1)..(379): tr|A0A4R8V0I1|A0A4R8V0I1_9MICO Isochorismate synthase O S=Cryobacterium flavum OX=1424659 GN=E3O21_16130 PE=4 S V=1
MRRNQGLAGIGCALRLEFSGPTRMTDAAAAWKQVARLATVTDPLARTGTGLLAFGAFAFDESSVQTSVLIVPEIIVGREDGQCWVTRIWATGQSAPENPLALHPLGDEYRIALLPGALPPDGFRAAVSSGIEHIRAQQVNKVVLARDLVGRVPAESDLRRAITKLALGYPDCWTYAVDGLIGSSPETLIRADHGSVNARVLAGTISRGADAEDDREAALALATSSKDGDEHEFAVQSVLKSLRPHTSVLATSEIPFTVKLPNLWHLATDLEGTLSDGSTSLDLIAALHPTAAVAGTPTDQALNLIRELEPFDRGRYAGPVGWVGADGDGEWAIALRCAQVAPEGGITAYAGCGIVLDSDPERELAETKMKFRPIVEAFG

SEQ ID NO: 93751 - protein, 379 aa, Cryobacterium levicorallinum
  misc_feature (1)..(379): tr|A0A4R8VRB0|A0A4R8VRB0_9MICO Isochorismate synthase O S=Cryobacterium levicorallinum OX=995038 GN=E3O11_06370 PE=4 SV=1
MRRNQGLAGIGCALRLEFSGPTRMTDAAAAWKQVVALATVTDPLARTGTGLLAFGAFAFDESSAQTSVLIVPEIIVGREDGQCWVTRIHVTGQSAGANPLALHPLGDEYRIALLPGALPPADFRTAVSSGIERIRAQQVNKVVLARDLVGRVPAESDLRRAISKLALGYPDCWTYAVDGLIGSSPETLIRADHGSVNARVLAGTISRGADAEDDREAALTLATSSKDGDEHEFAVQSVLKSLRPHTSVLATSEIPFTLKLPNLWHLATDLEGTLSDGSTSLDLIAALHPTAAVAGTPTLEALSLIRELEPFDRGRYAGPVGWVGADGDGEWAIALRCAQVAPEGGITAYAGCGIVLDSDPDRELAETKMKFRPIVEAFG

SEQ ID NO: 93752 - protein, 384 aa, Cryobacterium luteum
  misc_feature (1)..(384): tr|A0A5F0D4F0|A0A5F0D4F0_9MICO Isochorismate synthase O S=Cryobacterium luteum OX=1424661 GN=E3O10_12320 PE=4 S V=1
MRRNQGLAGIGCALRLEFSGPTRMTDAAAAWKQVVALATVTDPLTRTGTGLLAFGAFAFDESSTEASVLIVPEIIVGREDGQCWVTRIWATGENAPEQSMAKDPLVLHPLGDEYRIALLPGALPPDDFLTAVSSGIERIRAQQVNKVVLARDLVGRVPAESDLRRAITKLALGYPDCWTYAVDGLIGSSPETLIRADHGSVNARVLAGTISRGADAEDDREAALTLATSSKDGDEHEFAVQSVLKSLRPHTSVLATSEIPFTVKLPNLWHLATDLEGTLSDGSTSLDLIAALHPTAAVAGTPTDTALSLIRELEPFDRGRYAGPVGWVGADGDGEWAIALRCAQVAPTGGITAYAGCGIVLESDPERELAETKMKFRPIVEAFG

SEQ ID NO: 93753 - protein, 437 aa, Cryobacterium mesophilum
  misc_feature (1)..(437): tr|A0A4V3I9U3|A0A4V3I9U3_9MICO Isochorismate synthase O S=Cryobacterium mesophilum OX=433647 GN=E3N84_08765 PE= 4 SV=1
MPPVYSATPTACRARGDGYAGSVSVPEQTVPALTVSTVAIDDVESTLELLPPRRQLLWLRRGDGMAGFGEAARLEFSGPTRMTDAAAAWRRVAAAASVEDGIGVPGSGLIAFGAFAFSDHSPATSVLVVPSVVLGRRNGRAWLTRIRAGNDIDAPVPSTRSAVHSAPVAFTAGALPPDAFLAAVDAALNRIDGVGLSKVVLAREIVGRLTGPADTAAVLSALATGYPDCWTFAVDDFLGSSPETLVAVTKRTVTARVLAGSAARGTDAATDQQASLALATSAKDQDEHQYAVQSVLAALRPHSPGVTSSEQPFTLRLPNLWHLASDVEGTVADGSSSLDLIDALHPTAAVAGTPTPAAVALIEELEPFDRGRYAGPVGWVGGDGDGEWAIALRCCQVEPDGTVRAYAGAGIVAESVAEHELAETSLKFRPIVEAFAG

SEQ ID NO: 93754 - protein, 379 aa, Cryobacterium psychrophilum
  misc_feature (1)..(379): tr|A0A4Y8KMX3|A0A4Y8KMX3_9MICO Isochorismate synthase O S=Cryobacterium psychrophilum OX=41988 GN=E3T53_08315 P E=4 SV=1
MRRNQGLAGIGSALRLEFSGPNRMTDAASAWQAVVAAATVTDPLQRTGTGLLAFGAFAFDESSAQTSVLIVPEVIVGRENGQCWVTRIWPTGASAPTHPLTLDPLGNEYRIRLLPGALPAAEYRTAVAQAVARIAEQPLNKVVLARDLVGRLPEESDLRRAITKLALGYPDCWTYAVDGLVGSSPETLIRADHGDVNARVLAGTISRGVDAVSDTEAALALATSNKDGDEHEFAVQSVLKSLRPHTSVLTSSDIPFTVKLPNLWHLATDVEGTLSDGSTSLDLIAALHPTAAVAGTPTESALDLIRELEPFDRGRYAGPVGWVGADGDGEWAIALRCAQVSSTGAVTAYAGCGIVLDSDPERELAETKMKFRPIVEAFG

SEQ ID NO: 93755 - protein, 379 aa, Cryobacterium sp.
  misc_feature (1)..(379): tr|A0A5F0GP19|A0A5F0GP19_9MICO Isochorismate synthase O S=Cryobacterium sp. TMT1-2-1 OX=1259232 GN=E3T33_03275 PE=4 SV=1
MRRGQGLAGIGTALRLEFSGPGRMTDAALAWRRVVEAAAVTDPLARTGTGLLAFGAFAFDESSAEASVLIVPQVIVGREDGQCWVTRIWPTGSDAPDIPLELHPLGDEYRVALGPGSLSAAGYRAAVAEAVGRIAAQDLSKVVLARDLAGRLPAAADLRRPITELALGYPDCWTYAVDGLFGSSPETLIRADHGEVNARVLAGTISRGADPVADTEAALALATSTKDGDEHEFAVQSVLQSLRPHTSHITTSEIPFTVKLPNLWHLATDLEGTLSDGSTSLDLIAALHPTAAVAGTPTASALALIRELEPFDRGRYAGPVGWVGADGDGEWAIALRCAQVGPDGDVTAYAGCGIVLDSDPEKELAETRMKFRPVVEAFD

SEQ ID NO: 93756 - protein, 360 aa, Cryomorphaceae bacterium
  misc_feature (1)..(360): tr|A0A368D6J2|A0A368D6J2_9FLAO Isochorismate synthase O S=Cryomorphaceae bacterium OX=1898111 GN=DBW79_02270 PE =4 SV=1
MLIKKIKNLELIMISCPDFFLRLNFFYNQKTPFVCFRLPGTNTLKCYNGKEQKINHKAFPKDPGFIMMPFDKSKEGYFISSKTMFEAKILSDSLKNSLTEEFNQQEKFNSHKENYLKKIVDIKNTISKTELIKVVYSNSFELDLIENNFEAYFKKLLRLHKDAFCYLFYIPNEGYWMGASPETLLEVQDKKITTMALAGTKKRNVVRWGNKEILEQKIVKDEIKKRLTPLCKNLETTNSSTIKAGGIDHLKTTISGTTISSPSQIINAIHPTPAVGGAPKEKALLIIKKEESHNRSFYSGYLGEIDNMNCKLFVNLRCVHVKINKAKIFVGGGITVDSKPEKEWEEIINKSQTILKALFR

SEQ ID NO: 93757 - protein, 419 aa, Curtobacterium flaccumfaciens
  misc_feature (1)..(419): tr|A0A502BXQ3|A0A502BXQ3_9MICO Isochorismate synthase O S=Curtobacterium flaccumfaciens OX=2035 GN=EAH85_13275 PE=4 SV=1
MTRTTTAAPPLTVSTRILDDPGTVLRHTLRDRPLAFVRNGDGIVGIGEALRFTFTGPDRMRDAAALWRSVVATAVVDDPVQLRGSGLVAFGSFAFADDSADESVLIVPRVVLGRRRGKAWLTAIDTTAGAEPLAFTRTSVPVPRVGPHVSVELRPGQIDEATYAANVSEAVRRIVAGSAQKVVLARDLVGTLPSGADRRAVLLDLAAAYPQCVTFAVDGLVGATPETLARTDGTRLTARVLAGSAARGTDEVSDRAAAEALASSAKDVEEHAFAIDSLLAALAPLATDLRADAEPFRLQLPNLWHLATDVQATLPPDTTSLDVADALHPTAAVAGTPTDLAVRLVAELEGVDRGRYAGPVGWMSATGDGEWMLALRSARIDDDGTVRAWAGAGIVAGSEPEREVAETALKFRPITDALA

SEQ ID NO: 93758 - protein, 419 aa, Curtobacterium sp.
  misc_feature (1)..(419): tr|A0A433FWW5|A0A433FWW5_9MICO Isochorismate synthase O S=Curtobacterium sp. HSID17257 OX=2419510 GN=D8M35_0756 5 PE=4 SV=1
MTRTTTATPTLTVSTRILDDPGDVLRHTLRDAPLAFVRSGDGIVGIGEAARFTFSGPDRMRRASAVWRDLVRGATVDDPVQLRGTGLVAFGSFAFADDSAEQSVLVVPRVVIGRRRGKAWLTAVDTTPDPAPLTFSRTSVPVPAVGGHVSVALGPGQVDEDAYAAAVADAVRRITAGEAEKVVLARDLVGTLPAGADRRAVLLDLAAAYPQCVTFAVDGLVGATPETLARTDGTELSARVLAGSAARGTDPVSDRAAAEALASSAKDVEEHGFAIASLLHALRTVATDVRADPEPFRLQLPNLWHLATDVRATLPVGTTSLDVADALHPTAAVAGTPTDVAVRLVAELEGVDRGRYAGPVGWLGANGDGEWMLALRSARIEDDGTVRAWAGAGIVAGSEPAREVAETALKFRPIRDALA

SEQ ID NO: 93759 - protein, 428 aa, Cutibacterium acnes
  misc_feature (1)..(428): tr|Q6A6F5|Q6A6F5_CUTAK Menaquinone-specific isochorisma te synthase OS=Cutibacterium acnes (strain DSM 16379 / KPA171202) OX=267747 GN=PPA1940 PE=4 SV=1
MRRCCPCGHLGYPATVIVDPGSARLCARTVSISDPGPLENYMTPNDSVCFLHRNYGMVGLGEVTRFETDSPAAADVWWEALCDDLEHETEMPDAEATGPVAFGSFTFDPDRSSSRSVMILPKTIIGRWPGYSWLTQLSWDSITDDSPHQQSVPRPPGAVTVRDGVVSERSWRQVARLVQDIMSPGELDQIVLMRDVEAKASSSIDPRWIVETLRRQFPNAYTYLVEGSVGTTSKLTVGVSKSLITSRVLTHSPATDANHQTLLTALQGKGPLAAYHDEIVGRTCARLEQFCDTVHVPDCPGCVYNDASTYLVTDVTGIHSPDQGSCLALVQALCPPAFVTGLPPHCALSVLAEIEHVDRGRVSGPTGWVDSLGNGQWVTDCRGGQIDATDPSLVHIFSGHPVGHDDDADVLSAEAEHRIDVLRDLFLT

SEQ ID NO: 93760 - protein, 396 aa, Cutibacterium avidum
  misc_feature (1)..(396): tr|G4D035|G4D035_9ACTN Isochorismate synthetase OS=Cuti bacterium avidum ATCC 25577 OX=997355 GN=HMPREF9153_205 7 PE=4 SV=1
MHTLSCDVDLSAASGARWLDTARRYCPPEVEPWIWVAPDTDDAPAMVGWGEQARFTAGGHGAAAKAFNAYSSWAAQHSDAAPVAFGSFPFSRDEDGFLVVPAVLLLRRHLGERTLVFCADPTPIHRGDSDLPVIETQLPDLDAENWGQAVNAATTRLSQDPELEKVVLSRSVTVQASAPMDRGLVASRLSGKFSGCWTYCHDGLVGATPELLVDCRDGLFRCRVLAGTRKPSWSHELLQDPKEHREHELAVASVTDRLSEAGLSDPAVRGPFLLELPNVTHLATDITARVGTSNAAQIVDVIHPTAAVCGTPRELAYQFIEQTEVIDRGRFAGPVGWMSPDGSGQWALALRCGQFSEDNRSVRVHAGAGIMPSSDPDKEWIETGAKMEAFTSALEG

SEQ ID NO: 93761 - protein, 434 aa, Cutibacterium granulosum
  misc_feature (1)..(434): tr|A0A239WIE3|A0A239WIE3_9ACTN Isochorismate synthase e ntC OS=Cutibacterium granulosum OX=33011 GN=entC_2 PE=4 SV=1
MTVLPCSDGITALPGAQWLAEVLAWVPDGVDPWVWLAPDEDDAPAMVAWYEQCRFTARGENGIEQAWRQMVDWAREQPEGTCPIAIGSFPFDRSDGGFLVVPQVLIMRRHVGAPTQVFGAEEPLTRARTCWPHDDSHAAARPVDGNLEIDGLSSEASSLCRETVGANGHIVTSTPVITEEEWTTTVHRAVDELTSDRGLQKVVLAGAQDLTSDVPMNRSHVAATLARRFPGCWTYSADGLVGATPELLVDCRDGLFRSRVLAGTRKPEWADELLDDPKEQHEHELAVTSVLDKLADAGVGTPAVHGPFQLRLTNVVHLATDITAHVDGSNAARIVDAMHPTAAVCGAPRGQARELIAEVETLDRGRFAGPVGWMDTTGAGQWALALRCGQFSTDSHQVRLFAGAGIMPTSDPHHEWIEIGAKMQAFSSVLETQH

SEQ ID NO: 93762 - protein, 504 aa, Cyanobacteria bacterium
  misc_feature (1)..(504): tr|A0A3M1P5X9|A0A3M1P5X9_9CYAN Isochorismate synthase O S=Cyanobacteria bacterium J069 OX=2420337 GN=D6742_1814 0 PE=4 SV=1
MPVVPRPIEPVQDCKALYQLLSECQQHLNESRNESRNESRNQLLSSQLKPEAPSDCLWISISLEIDPVDPLLALQQFNTSSQPHFYFEKPYEGEAIAAFGNASVLYTGGDRRFLKAQKFLQRSLDNLFHQPPKHPSKASAVITTTPADLRYFCSFTFFDETHTIQSPFASAIVLLPEWQILRQPDRCVATANVVLYADTNLTTLTDSLWLKFQKIQQANYSLLGYTNYDPITPQSWNFLEINDFQKAVTSALHSIHKNHLQKLVLSHAVDVISRRPFEWLFSLHNLRQIYPDCCIFSVNQGTGKTFIGASPERLVSVRNQQLTTDALAGSAPRGRTAREDAAFAQLLMSTPKEQHEHQVVVDFLRDRLFQLGLSPQLPAAPDLLRLSNIQHLHTPIHAHLPAGLHPLELVDALHPTPAVAGLPRDIACEEIRRYEGFGRSLYAAPLGWVDAAGNAEFIVGIRSAMLGGDRARLYAGAGIVAGSDPARELAEVKLKLQALLKALV

SEQ ID NO: 93763 - protein, 476 aa, Cyanobacterium aponinum
  misc_feature (1)..(476): tr|K9Z0A7|K9Z0A7_CYAAP Isochorismate synthase OS=Cyanob acterium aponinum (strain PCC 10605) OX=755178 GN=Cyan1 0605_0457 PE=4 SV=1
MAIIPNHLSVLDYIQEFKKLIFSSSFNIKNNSSPSPIFSISCEVEPIDPLIFISVLQTDKQPVFYWQNQRKKEAIAAIGAIKSLNIDKNICQQDKDIDRFQKCQEFINNNQKLIHILNKDQDNYQPHFFTYFRFFEQSHNFDNKSFPLATIFLPFIQLIKKDNKYSVTINTYNQNKKEILDYLKDNFSEKIELNYKVNYSQENKINSHLENAKYQGFIDKVNKGLEAIKSEKLTKIVVAHALEIKTENKFNIVKSLENLRNNHPDCYIFSIGNEDQEYFIGASPERLLSIKDNQLVSDALAGSAPRGKNEDEDFLIGNNLLDSEKEKREHQAVSNFIFNQLSAMGLQPKKASLQLLKLSNIQHLWTPIYAEIKEEINPLEIVRQLHPTPAVAGVPIEVACQEIETSEKFDRSLYAAPIGWLDLQGNCEFIVGIRSALIKENYARLYAGAGIVTGSKPEQELTEIKLKFQALLQALI

SEQ ID NO: 93764 - protein, 477 aa, Cyanobacterium sp.
  misc_feature (1)..(477): tr|A0A2K8WSP2|A0A2K8WSP2_9CHRO Menaquinone-specific iso chorismate synthase MenF OS=Cyanobacterium sp. HL-69 OX =2054282 GN=menF PE=4 SV=1
MPVIPDNHFLTDYSQKLKELIFLSHPVTDNDAQIVSISQEISPMDLLVFLAMLKPENQVSFYCENQRKQEAVVAIGAIKSLEVKNEGGEVNGGYNRFEQCQNFIEDSKGKIIFEDNLDSQKIPYFFSSFNFLEHSSDSYQAFPQAKIFIPYIQLVKKANSYLVIVNTFYQKNAPELNLIKQYLKQDFSQNILHYYHRVHHSQCTPCRYTLEKSDYHNFTDKVNHSLKAIASEKLTKIVVAHALEIKLEDNFNITKSLTNLRDNHPDCYIFCVGNEKEEFFLGASPERLLSIQDRQLVTDALAGSAPRGKSDYDDSLLGENLLHSEKEKREHQFVSDYIFEKLSIMGLSPKRASLQLLKLSNIQHLWTPIYAEIIEERNPLEIIAQLHPTPAVAGVPIDIACAEIENYENFDRSLYAAPIGWLDTNGNCEFIVGIRSALIQGNRARLYAGAGIVAGSKPEQELTEIELKFQALLQALV

SEQ ID NO: 93765 - protein, 402 aa, Cyclobacterium qasimii
  misc_feature (1)..(402): tr|S7V7Q4|S7V7Q4_9BACT Isochorismate synthase OS=Cyclob acterium qasimii M12-11B OX=641524 GN=ADICYQ_4732 PE=4 SV=1
MEATNTLINASKELVISSLLVNALRNNAAIAIWRKPGSSTVEAITDKDQEGYIGQLKDLDRLPPGFMIHPFISSQLHPPLYIKATNYFSFNLNEEATDASQIGELPYIGEGKAAELAVEIRKFIHNSQPKATVTTTTKSNFIETVNKAIEAINSGELFKVVPAKVKSIELPNNFDLASVFLNLCKAYPNAFINCFYSEKTGLWIGASPETLIKTKGDKFFTMALAGTQKAKGENPLKNAAWTQKEIEEQALVSRYIVDCFKKIRLREYSEIGPKTTVAGDLLHLKSEFLVDMKSTNFPQLGSVMLELLHPTSAICGMPKEKAMEFLHSEETFDRSYFAGFIGPVNMNEETSLYVNLRCAKLDNKETLLFAGAGITEDSVPEKEWEETELKCNIIGQFIQPKK

SEQ ID NO: 93766 - protein, 471 aa, Cylindrospermum stagnale
  misc_feature (1)..(471): tr|K9X5L6|K9X5L6_9NOST Isochorismate synthase family pr otein OS=Cylindrospermum stagnale PCC 7417 OX=56107 GN= Cylst_5779 PE=4 SV=1
MTVSQCRSNFFVDHKDLYQFLSAVQENCLQHNCQQIVSISLEINLVDPLVVLEKLAQANEINFYFENKGKGEAIAAIDAVAKLHGDGSERFTQTEDFIKTCLKNIINFGNANLPFAGPHFFCYFSFFHQNQQADYPFPSATIFLPRWQIAVKNQRCILVANTIINASANITKILQNLETKIELINSLENSFSNIDYLPGQFHKKSVTNAARFKRSVVSALEQIRSSHLSKIVLADALDVKSNKHFNLGKSLNNLRQLYPNCYVFSTSNGRGQNFIGASPERLISIHKQQLITDALAGSAPRGKTPAEDADIANSLVNSTKERHEHKLVIDFITQRLSQLGLLPQVLAPRLRQLSNIQHLWTPISAVVPANVHPLKIVAQLHPTPAVAGAARDVACAEIRRYESFERGLYAAPLGWVDAEGNCEFIVGIRSALINGDRARLYAGAGIVAGSDPEKEFAEVQLKLQALLKALV

SEQ ID NO: 93767 - protein, 405 aa, Cytophaga hutchinsonii
  misc_feature (1)..(405): tr|Q11U89|Q11U89_CYTH3 Isochorismate synthase OS=Cytoph aga hutchinsonii (strain ATCC 33406 / NCIMB 9469) OX=26 9798 GN=entC PE=4 SV=1
MNSSTIVQTDISSTLCKQDLIKGSLYSALRHSYAIACWSNPESKNWDILIDPQPTLLAENKTPYLHKLPSGFLIAPFKSNAAKYFIQNKIHIQLGDTVNCSAQAGHESTLEDVLQTSRLAKDTSLSLADLLPEKEFLTQSADQDYINGVEAAKEIIVNSELQKVVLARSKDKQVNLANLETVVLNLREHYPLAYIGIFFHPETGLWISATPELLLCTDRNGTFKTVALAGTQKYNPEIPIRDVSWTHKEIEEQALVCRYIINCFKTIRLREYVEQGPRTIQSGSLLHLKTEYTANTSEVNMQELGTTMLQLLHPTSAVCGMPKKPAIDFIERHEQFDRKLFSGYSGPVNMEKETALYVTLRCAQVHANSITLYAGAGITADSVPQKEFEETNLKMNVIGNAFSNL

SEQ ID NO: 93768 - protein, 386 aa, Cytophaga sp.
  misc_feature (1)..(386): tr|A0A4R4KDS7|A0A4R4KDS7_9BACT Isochorismate synthase O S=Cytophaga sp. DMA-K-7a OX=2070510 GN=EZE20_13330 PE=4 SV=1
MGYPAAVWRMPHAQELNLLISIQDGIRQQIADLENLPACFVIHPFESPSSGESYILEGDVLITFSEDMQLLRLTNRLGEEQPAVQQLFDRAKQLSAQDEVKPVVWNGLSRRSETDPASRAHYTQAVEKAVEEIRAGNFMKLVLSRTKPGHYSKDFRPFQAFLRLCSAYASAFVSLVNLPDRGEQWMGATPETLVSVSADGIFKTTSLAGTQSIKNAEGDLIPPKKVLWGQKEIEEQALVSRYIIECFKKIRLREYLETGPKTIRAGNLYHLRTDFEVQMKEVNFAELGTVMLKLLHPTSAVCGMPRESARTFIKNIEGFDRSFYSGFLGPVQMAGESALFVNLRCVRLSEGTATFFAGAGITEDSDPMREWEETEMKCETLLSVLT

SEQ ID NO: 93769 - protein, 453 aa, Dechloromonas sp.
  misc_feature (1)..(453): tr|A0A5C7ZYK5|A0A5C7ZYK5_9RHOO Isochorismate synthase O S=Dechloromonas sp. OX=1917218 GN=E6Q42_02310 PE=4 SV=1
MGERGAAMTTLLARLHHPDTAAAFAAKALGLPATTLVSLTLPLPAQPQDWLNRLPAEGPWWYHARPARGEYLLGIGHACHWTSSGPQRLTALDHAFAGARRHWPGSEMARAFCGFAFAPESADSPFPNAVLAIPALLLRHEAGRSHAVLTAPAGALAVTLRELDTALARHQATRLDGVLTPVDTTLADQAWLARVGAALRDIDAGRLAKVVLGRRRRLRCTQTLPAAAVLSRLVAQQADSIVYGHGHGSLAFVGATPERLVRLHGQQASADALAGTAWPGSQSLDDGKNRHEQSLVVDAVIAALTAHGTAPPRQAATCARSAGRLSHLRNKITVEVAHGCSLFDLIASLHPTPAVGGWPNAAARNWLAAHGEVRTAWYSGGFGWLDSAGNGDIAVALRSALIDGERIELQAGAGIVAGSQPPTELAETEAKFGTLLDALLDRGADTRATGTES

SEQ ID NO: 93770 - protein, 387 aa, Dehalobacter sp.
  misc_feature (1)..(387): tr|K4L3S9|K4L3S9_9FIRM Menaquinone-specific isochorisma te synthase OS=Dehalobacter sp. CF OX=1131462 GN=DCF50_ p1094 PE=4 SV=1
MKYLKKEMKLENPLAFWTHFDKQDRLFFYNPLTGELIIGAIRWRTFAEGESYQNYDLVFSARTFFQSVRDPKWAGLGNETIAFKYYYVEKDGKQLLYYPEQAPKEEICGLEDRETKSVRHTYTIADDDYPQWQELFTNVKQEISLKNVDKVVISREVKISCATTVHVESVLKSLREKNPDSFVFAYAKEGRTFLGATPEILVQKADDEIISYALAGTIPRNAIDEGTQMEILLNDPKNLHEHRIVRDTIADVMKKYCAEVWIDETRILTLKNLYHLKTRLGAKDRSLLTDWVTRLHPTPALGGNPVGPALDIIAREEKHERGMYAAPLGIMDQNGNGIFVAGIRSALIQDNMVYAYTGCGIVEGSDCLEEYIETNDKLRTILEGLVP

SEQ ID NO: 93771 - protein, 484 aa, Dehalococcoidia bacterium
  misc_feature (1)..(484): tr|A0A521KRR8|A0A521KRR8_9CHLR Isochorismate synthase O S=Dehalococcoidia bacterium OX=2026734 GN=EPO65_00060 P E=4 SV=1
MARSPSPPILDTDIRGRSGTPPSRHHSDTPAPTEALRTVASVTAQSGSELASRIVEARRSAAPGSFISVTLPAGFDPRSLLNDPQRNNVAASYERPSRGLALVGVGVAGRVDVPSGAHPASVREQARALLHGPVGGDAPLLAPRLLGGFRFNPAGKVGDPWRDFGAGWLVLPQLMFVLSGESNAVVVAPGVDPGAAEAVVDEAPAEEPSATTLHVERPMDREAWLTSVAAIASEVRAGAYEKAVLASTQQLASDAPISIGRALSRLRAGYPDCHLFTMTEGGTTFLGASPELLVSLLDGRVRALGLAGSAPRGETPEDDARIGEALLVSAKDRMEHEAVVRAIRERLGSLTEDLVAPNQPELRRLRNIQHLATEISARVRPGTGLLDLVQRLHPTPAVCGWPADRARAVIEAHEAFDRGWYAGPVGWMDAAGDGEFAVALRSAVVSGNRAWLFAGNGIMGDSNPASELAEVQWKFRPLSEALGA

SEQ ID NO: 93772 - protein, 397 aa, Deinococcus maricopensis
  misc_feature (1)..(397): tr|E8U3H4|E8U3H4_DEIML Isochorismate synthase OS=Deinoc occus maricopensis (strain DSM 21211 / LMG 22137 / NRRL B-23946 / LB-34) OX=709986 GN=Deima_0181 PE=4 SV=1
MPVSLTADVPAGTPDTPSSATHLLHAYNDHASFFYASPTRTLLGQGALDQRAVPTPELTAHATDLLRPRPGQTRPLLVGAVPFHAEQPALLLRAQRTQQAGRLPALPHPGTPAPRTARLQPTPTPDAYEAQVQAARRACQDGTLRKVVLARTLHVTLDDVIDRAAVLRHLAQRNPDGYTFALRTGPDTHLLGASPELLLTRHGQQVHLHPMAGTCARAHDPAEDAERAHALARSAKDLHEHALVVDAIRSALTPLCAELHVPEQPRVVPTATLWHLATRITGTLRDPRTSALDLVRRLHPTPAVCGVPHDAARAFIRRTEPFERDLFTGAVGWMDADGDGEWAVTIRCADVRGREARLYAGAGIVGASDPAAERRETAAKFRTMLHALGVHADGEAL

SEQ ID NO: 93773 - protein, 378 aa, Deinococcus sp.
  misc_feature (1)..(378): tr|A0A418RCU5|A0A418RCU5_9DEIO Isochorismate synthase O S=Deinococcus sp. RM OX=2316359 GN=D3W47_03430 PE=4 SV= 1
MTQTATLPATQPLPHAATHAPAWRAPDRHLHLLDPHAAPLTAAQARHALSGAPDGTHLLGAIGFTPRDPAAFHLAHSTPPTSTATLSTAASTGTTVLHAASRPAPDAFEANVAHAAAAIARGELHKVVLGRTLDLHLHAAPDPRAVTARLAQDAPDAFVFCVPLGDGAQLVGASPERLLSKRGAQLRLRPLAGTRARHADPAEDLRRAHDLLHSAKDRHEHALMIAAIRETLAPLCRELTVPDAPRLVQTPGLWHLGTSIHATLRDPGLHVLDLVSAVHPTPAVCGVPAPAARDLIGTLEGPRGFFAGAVGWCDARGDGEWAVTIRCARLRSPHARLFAGAGIVAGSDPARERAETAAKFGTMLRALGVSPLDLEGVL

SEQ ID NO: 93774 - protein, 485 aa, Deltaproteobacteria bacterium
  misc_feature (1)..(485): tr|A0A4Q3L4P8|A0A4Q3L4P8_9DELT Isochorismate synthase O S=Deltaproteobacteria bacterium OX=2026735 GN=EOO40_030 55 PE=4 SV=1
MSDVDKQMRRAWQRSQAIGRPVLLRLHHKLAACEDPWVLWWQAQHRAAQPMPFAVFHAAERQFSAAAWGAVQRLKLPPERRFAAARQICASLFEQAMDVRADGDGTVDIDAPLAFLSLALDATPPRAQWGGWGGGQLFVPQVVVYKNAAGTAAVVVQPVDGRQPQEACVAHASGAAQRTLESLRRAAVEARPPAKLCPQASPRARALQSRAQWDTQVDRARQATRGPGLQKVVLARATRCRVPPGQAFCVASTLWRLRAHHPQSITFGMAGPDNTTFVGATPEVLVEVCGRRLRTQAVAGTAPRGNDARSDESFGVALMRSAKDRHEHEVVAAALQATLGSLCLELRREAQPQLVRLPRLQHLNTPFEGQLRQAGGVLELIERLHPTPAVGGFPQQDACSFLRRHEQLERGGYAAPLGFFTAASDGLFAVALRSMLLHGSVGYGFAGAGIVAASEPAAEWRETRLKLQTMQDALCMHSASQCVLA

SEQ ID NO: 93775 - protein, 428 aa, Dermacoccaceae bacterium
  misc_feature (1)..(428): tr|A0A563E4Z0|A0A563E4Z0_9MICO Isochorismate synthase O S=Dermacoccaceae bacterium C5-26 OX=1660198 GN=FGL98_05 970 PE=4 SV=1
MTLPLVDDAPGTPSLVARTTAIPDPGDLAALVPADVPARDVVSWLRDGDGLIGWGRAASVRTTGEDRFEDAEAWWRQVSAQAVCRTDVDVPGSGPIAFGSFAFSPHSDAGAALVIPAVVVGRRDGVSWVTHISPAGRLSPAPRIVPTPAASAPGELAYSDGALTGPQWTTAIARTVELIQAGDVDKVVMARDVQVEAAAPIGPQWLVQRLSEQYANTWTFSVDGLIGATPEMLVRREKGLVMSRILAGTIQRTGNDERDLALAGSLARSSKDLEEHEYAVRSVADALRPHCTSMNVPESPFVLHLPNVMHLATDVAGVLDDRASSLKLAAALHPSAAVCGTPTAAAAAVIEELEHMDRGRYAGPVGWMDTAGDGEWGIALRCGALDPHDTRHITIFAGCGVVAGSEPDAELAESEAKLLPMRDALTSD

SEQ ID NO: 93776 - protein, 428 aa, Dermacoccus nishinomiyaensis
  misc_feature (1)..(428): tr|A0A4U0RL33|A0A4U0RL33_9MICO Isochorismate synthase O S=Dermacoccus nishinomiyaensis OX=1274 GN=FA951_08465 P E=4 SV=1
MSLSPSPADAARTPHLRVRTQELADPGDLVSLVPAGRPAEDVMSWVRRGEGLVAWGRAASIATSGDERFADAESWWDALVAAADVEDEVALPGSGLVAFGSFSFRNSSDEGSALVVPEMVVGRRGGRAWLTTINRTSDRLPDVTPALAPTGVEARDGALTPAQWRSAVSDAIEMIRTGRIEKVVLARDEIHVADADIDPRWLLTRLAARYRDTWAFAVDGLVGATPELLVRSEKGLVTSRVLAGTIRRAGAGASSEEQDLALAASLARSSKDLEEHEYAVRSVEAALRPHCSSMNVPDAPFVLNLPNVLHLATDVSGALAGGASSLTLAASLHPSAAVCGTPTNEAALVIDELEHMDRGRYAGPVGWIDAAGDGEWGIALRSGQIDIENPCRIRLFAGCGIVAGSDPVSEVAESVAKLSPMREALRDD

SEQ ID NO: 93777 - protein, 438 aa, Dermacoccus sp.
  misc_feature (1)..(438): tr|A0A4Q4BYA1|A0A4Q4BYA1_9MICO Isochorismate synthase O S=Dermacoccus sp. 147Ba OX=2510111 GN=EVU97_05650 PE=4 SV=1
MPAFSHPSPPGPKRALGWSIVNEARPAATPRLRVRTYELTDPGDLVGLIPAGRPAEDVMSWVRREEGLVGWGRAAAVSTSGDARFADAEEWWDALVAAADVVDEVERPGTGLVGFGSFSFRNSSDEGAALVVPEMIVGRRDGHAWLTTINRTTDQLPEVKPAEAPTGVERTDGALSPAQWRGAVGDAIEYIRAGRIDKVVLARDEIHTADADIDPRWLLARLSTAYRDTWAFAVDGLVGGTPELLVRSDKGLVTSRVLAGTIRRTGSDDHDLALAASLARSSKDLVEHEFAVRSVEAALRPHCSSMNVPDAPFVLHLPNVMHLATDVSGALTDGASSLTLAASLHPSAAVCGTPTREAALVIDELEHMDRGRYAGPVGWIDARGDGEWGIALRSGQIDIENPCRIRLFAGCGIVEGSDPVSEVAESVAKLAPMREALR

SEQ ID NO: 93778 - protein, 440 aa, Dermatophilus congolensis
  misc_feature (1)..(440): tr|A0A239VRG2|A0A239VRG2_9MICO Isochorismate synthase d hbC OS=Dermatophilus congolensis OX=1863 GN=dhbC PE=4 S V=1
MTTPNVSSPHVTHTVNQAPAPRLYATTTALPPTDGPTHLHNALRDADPRTTLAWIRDGNGLIAHGRATTITTHGHSRFTDANTWWQTITNNATIDNDIQAPGTGLIAFGSFAYSPHSPHGATLIVPEHITGTHNGISWHTTITTTPTTPTPPPPAPPITEPGPATYTPGTLTETTWTDRVTQAIDAITNGHLDKVVLARDEHITTPHPIDPRWLLTQLTNSYPHTWVFAIDGLIGATPEMLIRLHNNTATSRILAGTIRRTGNTTTDTNLASTLTHSPKDLHEHAYAVTSVTDVLQPHCHTLSVPETPFVLDLPNVMHLATDVTGHTNTNINVLELAEQLHPSAAVCGTPRTTADNLINTLEGMDRGRYAGPIGWIDSHGDGEFGIALRCGHLDATHTNMRIFAGCGIVDASDPTAELNESHAKLLPMKNAFTPPQDAHP

SEQ ID NO: 93779 - protein, 474 aa, Desmospora sp.
  misc_feature (1)..(474): tr|F5SKV5|F5SKV5_9BACL Isochorismate synthase MenF OS=D esmospora sp. 8437 OX=997346 GN=menF PE=3 SV=1
MGGRTVTTMRELHNLAGLKEGAARARREQRPVLVSRTRLVNSLDPLSFFASATGYRGTRNFWSDPDREVTLVGVGAAWKLETHTREDSYLKTGQEWDHLLKGAIRVPAEAPTGTGPLLLGGFSFDPLAGKTPLWEGFFDASFILPQFLLTVTGGESWLTVNVLLQPGEDVEQRGKVLAEQEDELLEGAEDFHLSPPARTSFDVVEVEPDRWKKTVATAAREIREGALEKVVLARQLRLQSETSFSPEAGLYRLRERQPHSFLFAVERGEACFLGASPERLVKREGERLYSTCLAGTIRRGEDPEEDRKLGEELLSDPKNEGEHAVVVHMIREAFQQGCSQVRVPDSPTLYRVRDVQHLFTPVEGTPLPETTLLSMVQQLHPTPALGGFPQKEALARIRETEGMDRGWYSAPVGWLDYRGDGEFAVAIRSGLIRGREASLFAGCGIVGDSEPDSEYEETKLKFKPMLSALGGDGR

SEQ ID NO: 93780 - protein, 383 aa, Desulfitobacterium dehalogenans
  misc_feature (1)..(383): tr|I4A8R3|I4A8R3_DESDJ Isochorismate synthase family pr otein OS=Desulfitobacterium dehalogenans (strain ATCC 5 1507 / DSM 9161 / JW/IU-DC1) OX=756499 GN=Desde_1960 PE =4 SV=1
MRYQEKRINLKEPLAFWRNFEDEEKMLFYHPFKKELIIGTIPLKKFYGEENFRGYPYVFSRKTFFPTLKGPQWDGFEDETTAFEFYLVEKEGEQKLYYRDQEIEIQDQECIPRRHDYKLTAKDYGEWQGLFNQAKEEIRSKKVDKVVISRQVEIQCRTAVAIESVLKNLMENNPGSFVFAWYKQGKTFLGASPEVLVEKNKGTISSYALAGTGARNQQEADDIQQAALLNDPKNRHEHQLVVDYIAEIMESHSDEVVIGETTTLALKNLFHLKTPIQGKVKENSSLRDWVSRLHPTPALGGYPAEKALEIIARYENHERGLYGAPLGVMNEEGDGIFVVGIRSALIEGNKLYAYTGCGIVADSECEAEYLETANKARTILESL

SEQ ID NO: 93781 - protein, 463 aa, Desulfitobacterium hafniense
  misc_feature (1)..(463): tr|A0A098B3I4|A0A098B3I4_DESHA Isochorismate synthase/i sochorismate-pyruvate lyase MbtI OS=Desulfitobacterium hafniense OX=49338 GN=DPCES_3040 PE=4 SV=1
MLFQFEERVDFCQWMEREEHLMKKYYEKNISMESSKAIYEIAGRLCGGEKENVYLYENKDCVSVGVGRYCEIIVTPEEMVMEKEGVRQSIKVSDLCRDLDKLFKSVAVDSWRAYGIANFGLARYLYDLNMGGETEELFHFIIPDKEYRVHQDRILLRALNQEAIERMEKNIVNALQNRAGENNAILYDGQEILIFDQEYYKEIVELGVKEIRNKKYQKVILSRKIPVHHRLDMLQTYLQGRRGNTPARSYYYRFPDLEVAGFSPETIAEVDDAGTVYTFPLAGTRALLHDSETNNYLKEELLHDAKEVAEHAMSVKLADAELEQVCEAGSVAVIEFMSVIERGTVQHLGSRLRGKLRAEYNSWHAFCSLFPAVTASGIPKKEAIEAIGRMEKDARNLYSGGVLTYDNNGTLDAALVLRSIVQDSEETWVRVGAGIVEMSHPARELTETQEKVGSVAGQLVKEG

SEQ ID NO: 93782 - protein, 469 aa, Desulfobacterales bacterium
  misc_feature (1)..(469): tr|A0A1E7J5X5|A0A1E7J5X5_9DELT Isochorismate synthase M enF OS=Desulfobacterales bacterium C00003060 OX=1869303 GN=menF PE=3 SV=1
MSVVKYSSKIIESKDVRNQVNRFLPRIKGMIQSGKPLPLLVTCRTVPVDILRWLKSHSLYPRLYWYDREGSMEIGGYGSLMTVSEDDPSRFLTAFGKLSAMLDKHPQKDFLRFLGGMSFSPQEKQDNRWEDFPGFWFVLPEVMMLRINEDYFVSAGVLLEGHEDVNETFTSILESLKKTQAENPSPTPDQFPAIITRTDHPDYTGWTNNVDTSLHEISEGKIDKVVLARRTDLLFEKPVDAVDYLHALKDANDRCYCFLLQPRQDTAFLGATPERLFKTEKNLLVSEAACSTVVRGADPDEDQRRSAWLLQNRKELSEHGFVTGDLLEKFQQITKNACLSGQPKILQLANVQHLVSNISGVLENGISIGEIVSIMHPTAAVGGYPGPAATSLIKRLEPFGRGWYAGPVGIISHESAEMAVGIRSSLVTDRVISLFTGAGIVQGSTPESEWQEIEDKMSTAFKVLSGGLE

SEQ ID NO: 93783 - protein, 464 aa, Desulfonispora thiosulfatigenes
  misc_feature (1)..(464): tr|A0A1W1UV52|A0A1W1UV52_DESTI Isochorismate synthase M enF OS=Desulfonispora thiosulfatigenes DSM 11270 OX=656 914 GN=menF PE=3 SV=1
MKAENKELYDLIQMAINRAKDRKTNILLSYVQEIDEINPLTFFTLGSLFKGTRFLWSEPSRNQYLVGLGHAYTISNDFSQQRFWAVQYEWQRLVDNQISNIELKPSSGIGPILFGGFSFDPDKDKTDLWKNYQEAKMVVPSYMLTINKGKTFLTFNVLIHANDRLEEVIKDMKEKEKIIFQRKTIQDNNENIVINKENINVESWLNSVAGVVSEIKQGYVNKVVLARELRLQMREKIEVATVLERLLDEQPKSYIFALECEEDCFIGASPELLVKKEKNEFKSMCLAGTIGRGKTPAEDEKLGNELLNDHKNLYEHALVVEMIKNAMEKGCEEVEIAKSPSLYDLKNVKHLHTPVKGLAKEGVTILDMVERLHPTPALGGYPKEISMNIIRKKEVLDRGWYAGPIGWLDSKCDGEFAVAIRSSLIKGNIVSLFAGGGIVERSNPAQEYQETEMKFKPMLSALRG

SEQ ID NO: 93784 - protein, 503 aa, Desulfovibrio sp.
  misc_feature (1)..(503): tr|A0A3P1ZVA6|A0A3P1ZVA6_9DELT Isochorismate synthase O S=Desulfovibrio sp. OH1186_COT-070 OX=2491045 GN=EII23_ 06065 PE=4 SV=1
MGFLKTSLKHYSSRSPVGTLRRRLGTGGKYAVRSGTTVMVEALQRPLRSAIRNACQNASQQRQPALAITAASVPRMNLLSAFARYSPHMNANLWFGLTKKSILGLGAAIECTGHGADRFTDVSARWHDLIKNAVTEGDTAPVALGGFRFDTACPASPMWAGFADGALVIPRVTILQNGAEYCRIVAADYAPPGADADARIRNICSGFNIGENERNMPPPEQEGHISIFDSGNARKQWQNLVHNALDAISRGLAKKIVAARMIRATSTTPFAVPNIVKRLHAKNPQATVFAFGRCGTYFVGATPEILITAKERSFQTMALAGSAPRSGDPARDAELGQALLVSDKDRIEHDFVVQAVLRSLQPHCETLVADSAPSLHKLHKVQHLITHFKGNLSSGQNLLDIVAHLHPTPAVGGAPTEFALAFLREYEGIDRGWYAGPVGWLDAENNGEFMVALRSGVICGENAALFAGCGLVANSDPDMEYQETRFKFSTMLDGLCLTHGDGE

SEQ ID NO: 93785 - protein, 462 aa, Dickeya aquatica
  misc_feature (1)..(462): tr|A0A375ACV6|A0A375ACV6_9GAMM Isochorismate synthase M enF OS=Dickeya aquatica OX=1401087 GN=menF PE=3 SV=1
MAFFFQGVTRIIPYFQLGYGVNVLQFSDLLHQMHQALSEPLPAQTGFHAITLTLTLHDSGQLLAWLASQPVYPQFYWQHRQDDEEAAVCGDVCAFGDITQANAFLQRDDVDDSVRIWGVNAFDQHPIEPDAEVARLFVPRIALLRQARRLRVRVNLFSETSLAEDARQAQAFLRQLQPPQALAVLQARILSARHCPGLEQWRGLLNLALAEIAAGKLEKVVPARATMLSLNEPLRAATLMAASRAVNHHCYHFMLASAPEQAFLGSSPERLYRRRNNRLETEALAGTVANDSDEVTAAQLANWLINDVKNQCENMLVVDDICQRLHQVALTLDVMPPEIIRLRKVQHLRRTIQATLRATSDEACLRLLQPTAAVAGLPRRPARDFLARHEPFTRGWYAGSAGYLSCQQAEFCVALRSANVNARQLTLYAGAGIIAGSDPELEWQELENKAAGLKSLFESDEL

SEQ ID NO: 93786 - protein, 441 aa, Dickeya chrysanthemi
  misc_feature (1)..(441): tr|C6CQP3|C6CQP3_DICC1 Isochorismate synthase MenF OS=D ickeya chrysanthemi (strain Ech1591) OX=561229 GN=menF PE=3 SV=1
MNVQPFSDLLRRMHQALDEPLPEQAGFHAITLTLPLQDSSQLLAWLAAQPLYPQFYWQHRQDDEEAAVCGQVRVFEDITYAEAFLQRHDVDDSVRLWGLNAFEQRPAEENSAAFLFLPRIALLRQGQRLRLRINLFSDDSLRDDARDAQDFLRQLLPLQPLSTLHARIEDTHHCPDRRQWIALLHQALADIAAGQMEKVVPARATVLSLNQPLRATTLMAASRAANYRCYHFMLAFAPHQAFLGSSPERLYRRRHTRLETEALAGTVASDHNDEKAAELASWLMNDVKNQCENMLVVDDICQRLHQVALTLDVMPPEIIRLRKVQHLRRTIQATLRGSTDSECLHLLQPTAAVAGFPRAAARAFLSRHEPFRRGWYAGSAGYLSRQQSEFSVALRSASVDGKQLTLYAGAGIVAGSDPEQEWLELENKAAGLKSLLEDDIS

SEQ ID NO: 93787 - protein, 395 aa, Dickeya dadantii
  misc_feature (1)..(395): tr|E0SLE3|E0SLE3_DICD3 Isochorismate hydroxymutase 2, c hrysobactin biosynthesis OS=Dickeya dadantii (strain 39 37) OX=198628 GN=cbsC PE=4 SV=1
MSTLAATSSSLDARTLQHDDFLFLSPDNSLHARGCYAALPAAVADGGHLQGDVQQQVKALFARARQDGIARPLLVGAIPFDKRQPARLFVPQQSRWFARDTLQHEPLPATPLAVRQIREIPEHDAFCQMVSAGVAATRSGELNKIVLSRLLDIDTDQPLDSIRLLLQLNQQNPWSYNFHVPLEQGALLGASPELLLHKQGNQIVSQPLAGSARRSDDPVEDQRLRRTLMASAKDRHEHRLVTDDIQRVLAPRCRTLTIPDTPELLSTPVLWHLATRVQGEVLDTQENALSIACLLHPTPALCGVPFEAARDRIAQLEPFSRGLFGGIVGWCDDEGNGQWVVTIRCGEVRQNRVRLFAGAGIVPDSQPVSEWHETGVKLSTMLRAFGLRQDQECAA

SEQ ID NO: 93788 - protein, 442 aa, Dickeya dianthicola
  misc_feature (1)..(442): tr|A0A385XY83|A0A385XY83_9GAMM Isochorismate synthase M enF OS=Dickeya dianthicola OX=204039 GN=menF PE=3 SV=1
MNVQQFSDLLRQMHQALNEPLPEQAGFHAITLTLSLQDSSPLLAWLASQPVYPQFYWQHRQEDEEAAVCGQVRVFDDIAHAEDFLQRHDVDDSVRLWGLNAFEQHPVVKTNAAAFLFLPRIALLRQGARLRLRVNLCSETSLRDDARDAQDFLHRLLPPQPLPTLHTRIEAIRHCPDRRQWIELLHLALADIAAGQMEKVVPARATALSLDRPLRATTLMAASRAANYRCYHFMLAFAPHQAFLGSSPERLYRRRHTRLETEALAGTVASDHDDEKAAALADWLMNDVKNQCENMLVVDDICQRLHQAALTLDVMPPEIVRLRKVQHLRRTIQATLRSGTDSECLHLLQPTAAVAGLPRAAARAFLAQHEPFHRGWYAGSAGYLSRQQSEFSVALRSASVAEQQLTLYAGAGIVAGSDPEQEWQELENKAAGLKSLLEDAIS

SEQ ID NO: 93789 - protein, 442 aa, Dickeya fangzhongdai
  misc_feature (1)..(442): tr|A0A2K8QJH1|A0A2K8QJH1_9GAMM Isochorismate synthase M enF OS=Dickeya fangzhongdai OX=1778540 GN=menF PE=3 SV= 1
MNVQQFSDLLRQMHQALNEPLPGQAGFHAVTLTMSLQDGSPLLAWLASQPVYPQFYWQHRQDDEEAAVCGQVRVFDDIAHAEDFLQRHDVDDSVRLWGLNAFEQHPVAEANAAAFLFLPRIALLRQGLRLRLRVNLCSETSLRDDARDAQDFLRRLLPPQPLPTLHTRIEATRHCPDRQQWIDLLHLALADIAAGQMEKVVPARASMLSLDRPLRATTLMAASRAANYRCYHFMLAFAPHQAFLGSSPERLYRRRHTRLETEALAGTVASDHDDEKAAALADWLMNDVKNQCENMLVVDDICQRLHQAALTLDVMPPEIVRLRKVQHLRRTIQATLRSGTDSECLHLLQPTAAVAGLPRAAARAFLARHEPFHRGWYAGSAGYLSRQQSEFSVALRSASVADRQLTLYAGAGIVAGSDPEQEWQELENKAAGLKSLLEDAIS

SEQ ID NO: 93790 - protein, 440 aa, Dickeya paradisiaca
  misc_feature (1)..(440): tr|C6CBR4|C6CBR4_DICP7 Isochorismate synthase MenF OS=D ickeya paradisiaca (strain Ech703) OX=579405 GN=menF PE =3 SV=1
MQQLTDLLGQIQKALDKPLPNRPGFHAVTLSVTLADAGLLLAWLAAQPAYPQFYWQHRQDDEEAAVCGQVCDFDTMAEAERFLQRYNTDNSVRIWGLNAFAKQVVAGKARTSFLFLPRVALLRQGDRLRVRVNLFSARSLSDDALQAQAFIGGLRPLAPLPQLQNRILGIRHCPTRQQWIALLHLALAEIQRGNLEKVVPARATTLSLDTPLRATTLMAASRAVNHHCYHFMLAFAPFQAFMGSSPERLYRRRLQALETEALAGTVAGHPDDARAAELADWLMNDRKNQCENMLVVDDICQRLHQAAQSLDVMPPEVVRLRRVQHLRRTIQATLRQASDSECQSLLQPTAAVAGLPRAAAREFLARHEPFQRGWYAGSAGYLSRQQAEFSVALRSANVMDNDLTLYAGAGIVAGSDPEQEWQELENKAAGLRSLLDDDIA

SEQ ID NO: 93791 - protein, 440 aa, Dickeya solani
  misc_feature (1)..(440): tr|A0A2K8W3N8|A0A2K8W3N8_9GAMM Isochorismate synthase M enF OS=Dickeya solani RNS 08.23.3.1.A OX=1240086 GN=men F PE=3 SV=1
MQQFSDLLRQMHQALNEPLPEQAGFHAVTLTMSLQDSSPLLAWLASQPVYPQFYWQHRQDDEEAAVCGQVRVFGDIAHAEDFLQRHDVDDSVRLWGLNAFEQHPVAETHPAAFLFLPRLALLRQGAFLRLRVNLCSETSLRDDARDAQDFLRRLLPPQPLPALHTRIDATCHCPDRQQWGALLRLALADIAAGQMEKVVPARASVLSLDRPLRATTLMAASRAANYRCYHFMLAFAPHQAFLGSSPERLYRRRHTRLETEALAGTVASDRDDNKAAVLADWLMNDVKNQCENMLVVDDICQRLHQAALTLDVMPPEIVRLRKVQHLRRTIQATLRSGTDSECLHLLQPTAAVAGLPRAAARAFLARHEPFHRGWYAGSAGYLSRQQSEFSVALRSASVADRQLTLYAGAGIVAGSDPEQEWQELENKAAGLRSLLEDAIS

SEQ ID NO: 93792 - protein, 395 aa, Dickeya sp.
  misc_feature (1)..(395): tr|A0A5B8I2B4|A0A5B8I2B4_9GAMM Isochorismate synthase O S=Dickeya sp. NCPPB 569 OX=568768 GN=Dpoa569_001067 PE= 4 SV=1
MSTLAATSSSLDVRTLQHDDFLFLSPDNSLHTRGCYAALSMPVADGGHLQGSVQQQVNALFARARQDGIARPLLVGAIPFDKRQPARLFVPQQSHWFARDTLPPDTQPATPIRARRIREVPGHDAFCQMVSAGVAATRNGELNKIVLSRLLDIDTEQPLDSIRLLRQINQQNPWSYNFHVPLEQGALLGASPELLLHKQGSLIVSQPLAGSARRSDDPVEDQRLRRTLMASAKDRHEHRLVTDDIRRVLAPRCRTLTIPDTPELLSTPVLWHLATRIQGDVLDARENALSIACLLHPTPALCGVPFEAARDRIAQLEPFTRGLFGGIVGWCDDQGNGQWVVTIRCGEVQQNRVRLFAGAGIVPDSQPVSEWHETGVKLSTMLRAFGLRQDQECAA

SEQ ID NO: 93793 - protein, 441 aa, Dickeya zeae
  misc_feature (1)..(441): tr|A0A2K9QCF2|A0A2K9QCF2_9GAMM Isochorismate synthase M enF OS=Dickeya zeae OX=204042 GN=menF PE=3 SV=1
MNVLQFSDLLRQMHQALNEPLPEQAGFHAITLTMSLQDSSQLLAWLASQPVYPQFYWQHRQDDEEAAVCGQVRVFEDIAHAEAFLQRHDVDDSVRLWGLNAFEQRPSGANTSSFLFLPRIALLRQGRRLRLRVNLFSDISLRAEARDAQDFLRQLQAPQPLPQLHSRIEATQHCPDRQQWIALLHQALADIAAGKMEKVVPARATVLSLDKPLRATTFMAASRAVNHHCYHFMLAFAPHQAFLGSSPERLYRRRHTRLETEALAGTVASHQNDEKAAELADWLMNDVKNQCENMLVVDDICQRLHQVALTLDVMPPEIVRLRKVQHLRRTIQATLRSSRDSECLYLLQPTAAVAGLPRAVARTFLAQHEPFQRGWYAGSAGYLSRQQSEFSVALRSASVAESQLTLYAGAGIVAGSDPEQEWQELENKAAGLKSLLDEAIS

SEQ ID NO: 93794 - protein, 376 aa, Dietzia sp.
  misc_feature (1)..(376): tr|A0A5A9ZRG8|A0A5A9ZRG8_9ACTN Isochorismate synthase O S=Dietzia sp. ANT_WB102 OX=2597345 GN=FQ137_09755 PE=4 SV=1
MASGPHPDVARPVTAPDFLLSRPTGSLRTQGAVNSFRDPADAALALRSGASGLVVGAFGFEPDAPAALVEPDVVVRVDGPLEPPAYFRGMRTRARVVEEIPTAREHRTRVSTAIASVRSGGIDKVVLARAVRLASDEPIDPHAVCAALIDSSPAADGYLVDLSPAGGAHVGRVLVGSSPELLVRRRGDLVECHPLAGSAPRSTDPATDQAAARALRASGKDASEHAFVVESLARALGPLCTELEIPDQPTLTSTREMWHLGTRIRGRIADPRTTSLDLALAVHPTPAVCGTPTDEARRLIAAIEGNRGFYAGAVGWSDSSGDGDWMVTIRCAEIDADRYGAVAWAGGGLVADSEPDDEVAETGAKLRTVLRAFGAF

SEQ ID NO: 93795 - protein, 377 aa, Dorea formicigenerans
  misc_feature (1)..(377): tr|A0A564TWS3|A0A564TWS3_9FIRM Salicylate biosynthesis isochorismate synthase OS=Dorea formicigenerans OX=3948 6 GN=pchA PE=4 SV=1
MKYHTIKVEIKNVLLLWEQVKAQEKFFFYNPYEKKMILAWERNCRIEDCIDEKVPFFYTIRFNEEKVEKEWENYCTEKIVFNYILYSDKDGTFLIYRDKKPKLIESDHAIIRHIYNMEKGNYHSWEKLYTNIKNEIKEGKVKKVVASRKVVVHSTKKFDIVSIILNLLNSNKESFVFAYEKNKKTFLGASPEILVQKTESIIKSYAIAGTMPKKKHIERGKWLLDDLKNNEEHKIVVDYIAGIMKKNAEEIYISRTTLLELKNLYHLKTEVMAKNLNLSLVDWAKLLHPTPAMCGVPKEKAMGIINDYEEHDRGLFAAPIGVIDEKGDGVFIVGIRSALIEGNTLYAYAGCGIVEQSDCREEYEEINNKLRTILEAL

SEQ ID NO: 93796 - protein, 418 aa, Dyadobacter sp.
  misc_feature (1)..(418): tr|A0A4R5DPK1|A0A4R5DPK1_9BACT Isochorismate synthase O S=Dyadobacter sp. AR-3-6 OX=2541721 GN=E0F88_07960 PE=4 SV=1
MVSVQTGSKTSIFEGLKTENLWEASKTLGFPAALWRLPYTNEIKILISIQDAISKIQPDFEKLPCGFLMGSFDWQENEPVNFMEGDIIVTFGENNQAVQTSNRLGEEHPDVKRLVALSWEIQEKTVYRRAGEHALSGVLLTDERSKERFKRTVELAVAAISHNQFKKVVLSRTKEIQYNDDFQPAKAFSKLAKAYPHAFVSLVNLAEQNELWLGASPETLVEQKSNGTFKTMALAGTQKARNSEGDLIPKYDVRWGQKEIEEHALVSRYIVECFKKIRLREYSETGPKTVLAGNVYHLRTEFDVDTIALNFSELPTTMLKLLHPTSAICGEPKLPSLKFIQEVEGYDRSFYSGFLGPVQVEGESNIFVNLRTVRLKNGVATLFAGAGITEDSVPEQEWQETELKCDTLLKVIAEDFIN

SEQ ID NO: 93797 - protein, 372 aa, Dysgonomonas capnocytophagoides
  misc_feature (1)..(372): tr|A0A4Y8LEC6|A0A4Y8LEC6_9BACT Isochorismate synthase O S=Dysgonomonas capnocytophagoides OX=45254 GN=E2605_020 80 PE=4 SV=1
MEFSKHTEYNILDSLIDNNIHFALYRLPKTNTINLIMQKSDITQTFSNLSELNGKNGFTIVPYQITGSTPVILIKPDVILNNEQNILDYIKKLDLHQKNGYRPASYPDKEDCNSFERYCKVYDLFQEELESGKCTKLVLSRTFDIDKGDRFSAGASFAKACSKYPNSFIYLCHTPISGTWLGCSPERLISGQDNQWITDALAGTQKAESDIASAVWDDKNKLEQQIVADYMHQQLQKAGITSSHNNVETIQAGNLLHLRSEFSFHLDNPSQIGHVLDLLHPSPAINGFPKEEAFNFILDNEGYNRSYYSGFIGNLNTEERTDLYVNLRCMQIFDNKLRLYAGGGILPSSDLFSEWKETENKLQTIISIIENI

SEQ ID NO: 93798 - protein, 400 aa, Echinicola sp.
  misc_feature (1)..(400): tr|A0A514CP10|A0A514CP10_9BACT Isochorismate synthase O S=Echinicola sp. LN3S3 OX=2591634 GN=FKX85_11075 PE=4 S V=1
MNTPTADTHLITQEEVLDRWLCSALEGGFQIAIWRAPKSNSVQLILDQTKEIKRVNLELDILPQGFIAHPFADQEDQKAFFLEASDYFKFDIDTPMTEAEDELYKKAKRSPTEIKGQVNQLLRKAQPEKNSFQFSSTSKSSFIEFVEKGIKAIQDGKLSKVVPARIQKVHLKDNFDLTKTFLELCQRYPDAFVNFFHIPNVGTWLGATPEILIKTEGLYFHTMALAGTQKAEGEDPVRNAAWKQKEIEEQAMVSRYIVNNFKKIRLREYEENGPKTVKAGNLLHLRSDFRVNMEATNFPQLGSVMLKLLHPTSAVCGTPREDSMKFILEHESFDRCFFAGFIGPVNIENRTAIYVNLRTAQLINEDVLLYAGAGVTADSVPEKEWEETTLKCDIIGKFIQ

SEQ ID NO: 93799 - protein, 2626 aa, Ectocarpus siliculosus
  misc_feature (1)..(2626): tr|D8LMF2|D8LMF2_ECTSI Similar to Isochorismate Synthas e OS=Ectocarpus siliculosus OX=2880 GN=ICS PE=3 SV=1
MEQQTKVHAVTAAAAAAAAQGSGRHGVVDLTPHSSAAVPATSATGQGGAAAAAPTGGGEANGAPENGIEKKAKPMTRKTPVPLWKARDILLQAVSDSGGESEFLQAHSALSSIYRGMGRERRSPPVSGDDVGDDVEHVFSIRLEVLVDTEELGQNEQDAPLAWFGAQPPPRSTRCSPPSRSPEFLEDDPTLPRSFLRSPPPSSISVSRGDSDEGREACDGGGGGGGGKGRLGFGGDEAGAAAAAGIAAAGVGAAHVLTGPGRLEDGAWGEASSGCPGMRYYGGARFEPLSRKRRSSGGAVAAASRGDGGSSEGGVSEAGDMGEPSPCWRAYGGHWLVLPQVELSSVAAAAQAGGGRPAAVLAVNLRWTGADGSTAPAVASTGNTSAVRSGKDGVEGERKADIGGEESTAAGSGASDVGAPAPAPPEASSTATAASKGPVTAAIGAVGGYGCERDRQRSGSGAVAAAGKGGRQPGGQDGRGGGGGLAAARARAARTLSRIACRFARPGTEAELPLPLTAGEDGDPVTNTEGPEYRRWERGIERALDDMDKERYCKVVLARTARLRFAGPLSPPNVLARFRGHYGFLFCLQPDASTAFLGCTPERLFLSKGSTVVTEALAGTRGRGDTTTEDERLGEELMDSEKFRGGGGGLRVVLALVDVRENAITADYVSAALRKAGAVKLNCSEPSLKRLTHVQHICRRITATLAPGTDNDCSEGGFCRDDAEGGGQGRGAGGAGRSLLREMHPTPAVCGTPRDVTYSVIGEVEGFDRGFYAGPVGYISAGASEFGVAIRSALVTDSWSSPEGFSRRGGVLGSAGGPAARGVGGGSEMTLFAGAGIVPGSVALLEWAETGVKMKNFLSLFPARPVRGLREMPNVNSLWGALVVEELVRLGVRHFCVCPGSRSAPLAVAIARHPSAVSISHHDERGAGFYAVGFARAGPGRGGGAHSSSTSDKAGGGGGGGVGSGALGMCAVVTSSGTAVANLLPAAAEADAAGLSMLLLTADRPPELRGCGSNQTIDQARCCMVNLLGSRARLSLDVQCPTDEVSAACLLSDIDHAVSRALGGGGGGGVPGPVHLNFMFRENLAPVEGAVRDAGVPGLSSAWSDRCLDSPRMARWEAGIEPFTTTAGGGGGLGRRGEGLQQVVDRLLCARRGILIVGSLIGPEERADVRHLAVTLRWPVYADVTSGLRCWSAEMGLGVGRLDQLLQDDAVKEAIAPDAVLQVGSPLTSKRVQKFISEPAATLTAPVSVICSPLVAWHDPGRGFTTRLASSTRDLAAAVDAGVSSSGVAIGGSELLALVDVSNAVERAQTRAIACAAAGPIEDEAGSSSLSRQPSSPPRVAKGVAAGGGEGSEGGDCYDGVNDTSEGGRRPPAQQHQQHQQHQRQQRQQQPQPLTEPFVAWCVSRHIDPAAGLFLSASMPCRDVEVFADSGLGDLDGRGEEDRGSGGRRLSDVASNRGASGIDGVFSSAMGYAAGLRSAATLLIGDMATLHDLGSLHALKGLDAAGSCSVTMVCVNNGGGGIFSFLPIADARHGDAFSPLFDTPHSVDFEGVCLSMGLEYRRATTAREFRSAYLESQGVLGGGGGEGAGTRRRRRHFFIEAVTCREENLPVHRSLGGIGRAAALDHLLRGVRLGWEFTPAPVARTWPPSPAGVSNGSLGRGRGGGDKKKPTLLLLHGFMGSKEDWRGDFAELAAAEGHAVLNVELPGHGGGSGGGSNSDGKSTTAAAGGGQRGDDVLRTVGGECDGGIVEEGGGGGGFPGVPNGDVATDDNPRGGGGTERSGERSGVSGAAATTTAQNGGGGNLVGSAPAQRDEQPRGSSSCAAGWDNESNDDGVVPSWGLGGVFLAAEAVGAVCDAVGAGPYVMVGYSMGGRVALALAARRPRVMEGGGGLVLVSSSPGLASSSAARLSRWACDRALASRIAALGRRPTASSVAGVNVRERPAEEEARAFLDRWYAAPLWGDVRHRRPSAYSAMIDRRLSNLGFDPSHRGRDDKPGAPREVIKSDSHGGKKAILNNSSTGLRRDSGLGNGRGEGNSSEAGLRTCSGRGLRSESGDRDGKKDREGICLVPTGRDGGAGGSRSLKARELARSCLALSVARQANLWPLLRQLSDKKNTDKMGGGGGAGDKNSVLPVVYVAGELDPRYGGRCGAVGGSGTSGGGGGVHGEPQVGSANAANGTTPPPSFPSEQGGAAGGGGCGADISGVVKGTSVTEVGRVAGAGAGCAALASAAVVPGARTVAQAVEELSLCKLTERRGVLVRLEALLPQSPETGVGREQEEGRRVWGVGEVTPLPADGGSGSGDGRTPKEVGPPPPPSAAAAAAAAVTTPPVGSSATAAATTTTTSATATATHPEGSSAETTTATSTTRSSPSRLLPTVRCGIEMAVVHLVARAAGVSVGAAVSAASGLPCRGAVEINGLATRGEGVATGGSTEAGPRVLKVKVGGIAGPSEDAAGGVAGVTGGGEGVEGVDLSLVEYIEEPLREPRSLGKFWERSGGIVPYALDESLAMGREKFTDKLEGCAAFVVKVSVVGGLSRSARLCGLARRLGAEAVLSSAFETGVGLAHASILASCFTTPGVAHGLSTYSRLQGDVATPGFASTVSGGKVDTLACEELLDRVAMRWDGAGV

SEQ ID NO: 93800 - protein, 481 aa, Ectothiorhodospira marina
  misc_feature (1)..(481): tr|A0A1H7NKC2|A0A1H7NKC2_9GAMM Isochorismate synthase M enF OS=Ectothiorhodospira marina OX=1396821 GN=menF PE= 3 SV=1
MGPDRPGLSRSAPPDWAREAWTPELRPGLPLHGPSPHEPAVDRLLDEIKNWRFREGELLHAAATVPTIDPFHWLENNPGESRCLWQNRERTLTLAGIGAAAELSADTAEDYDRLLERINHIIGDRDTAFVGGFAFDGRSGEGEWHDFPAARFVLPAIELRQRDGHFRLAVNLRASTRREFVRRKTRLITSLCRLRFTPPASADAPWPIRVTRRMDDMSFDECQGHIHHILEHIQQGGIHKAVLARRVKLQLNDALPGFAALKRWHHTNSGSFCFALEHGHKLFMGCSPERLFSREDRRVCTESLAGTVRRGRSRQEDAQLEHTLLQDPKLIHEHELVTRYVRERIAPWVTHTDCPTEAGVVKLDRIQHRYLPIRATLRPGVMDDQLLKALHPTPAVCGFPRQEAQELIARRESIHRGWYSGVVGMISPRRSEFAVAIRSALVERNRVLCYSGVGIVEGSTPEAEWNELEAKIESFLAVLGS

SEQ ID NO: 93801 - protein, 462 aa, Ectothiorhodospira mobilis
  misc_feature (1)..(462): tr|A0A1I4SLG8|A0A1I4SLG8_ECTMO Isochorismate synthase M enF OS=Ectothiorhodospira mobilis OX=195064 GN=menF PE= 3 SV=1
MDSGRPPVTSRDTPAQGTAHDRAVADLLGRIKNWQFRDGTLLRASVPLPPVDPLLWLQAHEQPPRCYWRNRDHTLTLAGLGSACTLEARSEAHYAAVLHRINTLIGDEDAFFVGGVSFDGRPGREAWARFPAALFVLPAIELRQDEAGCRLAVNLWAESQQAFMREKTRLITALCQLRFDADPPWEPPVRISRREDHMDFPACAEHIGAILERIAGGSLRKAVLARRVQLHLDTPLPVFTTLRRLRAGSTDSFCFALERDGQFYMGCSPERLFSRIDRHVCTESLAGTVRRGETPEEDRRLERLLLDDPKLVHEHELVTRYVHDQIAPWVTRAETPEHAGVVKLDRIQHRYLPLCGTLRPGVMDEQLLRTLHPTPAVCGFPRREARELILEREPVPRGWYSGTVGVVSPRHSEFAVAIRSALVEGNRMMLYSGVGIVDGSRPEAEWNELEAKLETLLCAVEN

SEQ ID NO: 93802 - protein, 415 aa, Edwardsiella anguillarum
  misc_feature (1)..(415): tr|A0A076LEA1|A0A076LEA1_9GAMM Menaquinone-specific iso chorismate synthase OS=Edwardsiella anguillarum ET08081 3 OX=667120 GN=menF PE=4 SV=1
MALPFAAHDSDSMLAWLATQPLYPQFYWRHRSDEEEAAVCGALQVFRDAEQAQAFIRRHRQPDLRIWGLNAFDRVTLEGYGEVESLLFLPRLALLRRGDRAELVVYLYSETSLQADLPRALSDLAALLPPQPLGALQAQVLSAAHQPDHDAWCALLTQALAAIARNEFAKVVMARCTTLTLSEPLRAAQFLAASRAVNHRCYHFMLALAPHRAFLGSSPERLYRRIGVQLETEALAGTVARGGNEAQRRDNAAWLMQDGKNQHENLLVVDDICQRLRSGAGAPTLEVMAAEIVALRKVQHLRRTIHVTLNQQDDAECLRRLQPTAAVAGLPREPARYFIMRDEPFARGWYAGSAGYLSLAQAEFAVALRSALIEDDRIHLYAGAGIVAGSDPQQEWLEIENKAAGLRTLLEGESL

SEQ ID NO: 93803 - protein, 442 aa, Edwardsiella hoshinae
  misc_feature (1)..(442): tr|A0A376DBL3|A0A376DBL3_9GAMM Isochorismate synthase M enF OS=Edwardsiella hoshinae OX=93378 GN=menF PE=3 SV=1
MHQFTTLIERIVPLLDAVAHSGPGLVRVALPFRAQAGEGMLAWLASQPLYPQFYWRHRSDEEEAAVCGALQIFRDAEQAQAFIRQQNNPALRIWGLNAFDRVAVPGIGEVASLLFLPRLALLRRGDEAELVVYLYSDHSLRDDLACALRDLATLLPPQPLGSLQATVLSAAHQPDRTAWCALLQRALAAIARNDFAKVVMARRTTLTLSEPLRAAQFLAASRAVNHRCYHFMLALAPHRAFLGSSPERLYRRIGRKLETEALAGTVARGENDEQCRANAIWLMQDGKNQHENLLVVDDICQRLRGSAGAPTLEVMAAEIVTLRKVQHLRRTIHVTLNQQDDADCLRRLQPTAAVAGLPREPARRFIMRDEPFDRGWYAGSAGYLSLTRAEFAVALRSALVADQQIHLYAGAGIVAGSDPQQEWLEIENKAAGLRTLLEGESV

SEQ ID NO: 93804 - protein, 442 aa, Edwardsiella ictaluri
  misc_feature (1)..(442): tr|C5B7I3|C5B7I3_EDWI9 Isochorismate synthase MenF OS=E dwardsiella ictaluri (strain 93-146) OX=634503 GN=menF PE=3 SV=1
MHHFTALIQRIVPQLQKAAQQGPGLVRVALPFAADDSDSMLAWLATQPLYPQFYWRHRSDEEEAAVCGALKVFRDAGQAQAFIRGYNHPDLRIWGLNAFDRVALDGYGEVESLLFLPRLALLRYGDRAELVVYLYSETSLQEDLPRALSDLATLLPPQPLGSLQAQVLSAAHQPDHGAWCALLTQALAAIARNEFAKVVMARRTTLTLCEPLRAAQFLAASRAVNHRCYHFMLALAPHRAFLGSSPERLYRRIGRQLETEALAGTVARGENEVQRRANAAWLMQDGKNQHENLLVVDDICQRLCSGAGAPTLEVMAAEIVALRKVQHLRRSIHVILNRQDDAECLRRLQPTAAVAGLPREPARYFIMRDEPFARGWYAGSAGYLALAQAEFAVALRSALIEDERIHLYAGAGIVAGSDPQQEWLEIENKAAGLRTLLEGESL

SEQ ID NO: 93805 - protein, 442 aa, Edwardsiella piscicida
  misc_feature (1)..(442): tr|A0A034SYU0|A0A034SYU0_9GAMM Isochorismate synthase M enF OS=Edwardsiella piscicida OX=1263550 GN=menF PE=3 S V=1
MHHFTALIQRIVPQLHKAAQQGPGLVRVALPFAAHDSDSMLAWLATQPLYPQFYWRHRSDEEEAAVCGALQVFRDAEQAQAFIRRHRQPDLRIWGLNAFDRVTLEGYGEVESLLFLPRLALLRRGDRAELVVYLYSETSLQADLPRALSDLAALLPPQPLGALQAQVLSAAHQPDHDAWCALLTQALAAIARNEFAKVVMARCTTLTLSEPLRAAQFLAASRAVNHRCYHFMLALAPHRAFLGSSPERLYRRIGVQLETEALAGTVARGGNEAQRRDNAAWLMQDGKNQHENLLVVDDICQRLRSGAGAPTLEVMAAEIVALRKVQHLRRTIHVTLNQQDDAECLRRLQPTAAVAGLPREPARYFIMRDEPFARGWYAGSAGYLSLAQAEFAVALRSALIEDDRIHLYAGAGIVAGSDPQQEWLEIENKAAGLRTLLEGESL

SEQ ID NO: 93806 - protein, 442 aa, Edwardsiella tarda
  misc_feature (1)..(442): tr|A0A2A7U1K3|A0A2A7U1K3_EDWTA Isochorismate synthase M enF OS=Edwardsiella tarda OX=636 GN=menF PE=3 SV=1
MHQFTTLIERIVPLLDAVAHEGPGLVRVALPFRAQAGEGMLEWLAAQPLYPQFYWRHRSDEEEAAVCGALQIFRDAEQAQAFIRQQNNPALRIWGLNAFDRVALEGIGEVESLLFLPRLALLRRGDEAELVVYLYSDHSLRDDLARALRDLAALLPPQPLGSLQAAVLHAAHQPDRDAWCALLQSALAAIARNDFAKVVMARRTTLTLREPLRAAQFLAASRAVNHRCYHFMLALAPHHAFLGSSPERLYRRIGRKLETEALAGTVARGEDDEQCRANAIWLMQDGKNQHENLLVVDDICQRLRGSAGAPTLEVMAAEIVALRKVQHLRRTIHVTLNQQDDADCLRRLQPTAAVAGLPREPARRFIMQDEPFDRGWYAGSAGYLSLARAEFAVALRSALIVERQIHLYAGAGIVAGSDPQQEWQEIENKAAGLRTLLEGETA

SEQ ID NO: 93807 - protein, 490 aa, Eggerthella lenta
  misc_feature (1)..(490): tr|A0A5C5BZS0|A0A5C5BZS0_EGGLN Isochorismate synthase O S=Eggerthella lenta OX=84112 GN=FIC87_05615 PE=4 SV=1
MTRIFSYTQPIEADIVDAYCALQKGFTDQFVYYRKDRPVRFMGMGRCIALPALDGIECELEGPVGQQPVFFSFNRFDAENPSPTDELFEAFPRLKFMLPEVILVEDDRGAYLQVNSLSPVYPGRIARFARQAAAAPRRNRRTIPFKLEPDSRAAWRANVEAALDAIGRGRISKVVLSRRQRLEALEPFSSKDLLVNLIDGPARGTVLLYRYADVFFCGCTPELLVRKRGNEVESMCLAGTCPAGATEEERARLADELMADAKNRAEHDYVVRFIREVFNRTCYDVDVPAQPGILPLTHVQHLCTPARARMLEGVDLWTMKDDLHPTPAVAGTPVGEAQMLIRSIEAYNRGFFAGACGYVDGAGDGEFSVALRTGVFDGEVGWVYAGCGIVEGSVADDEYDEIGMKLKTILSAFDGGEIPSACQPTERVDAAASRSTRSVAADEDSRTKVSPVGTSCGARHASAIDPSLGTAETLADVTNDRRHTSDGGAR

SEQ ID NO: 93808 - protein, 488 aa, Eggerthella sp.
  misc_feature (1)..(488): tr|A0A415XV03|A0A415XV03_9ACTN Isochorismate synthase O S=Eggerthella sp. AM16-19 OX=2292042 GN=DW178_01985 PE= 4 SV=1
MTRIYSYTQPLDADIVDAFCLMQKGFTDQFVYYRKDRPTRFMGLGRCIALPTLDEVECELTGPAAEQPVFFSFNRFDAHNPAPADELFQSFPNLHFMLPEVVLIENKSGAFLQVNSLGPVYTGRVERFARLALTAPHRTRRTVSYQLELDSRSAWEQAVGSGLDAIKSGRVEKVVLSRRLKLRADEPFSSKDLLVNLIDGTAHGTVLLYRYADVFFCGCTPELLVRKTGCELESMCLAGTCPASPDPAENERLAQGLLNDAKNRAEHDYVVRFIRDVLGRTCYAVDVPKQPTIMPLTRIQHLMTPARAKLLEGVDLWSMMGDLHPTPAVSGTPVGEAKMLIRRIEAYNRGFFAGACGYVDAAGDGEFSVALRTGVFDGEIGYVYAGCGIVDGSRAADEYDEIALKLKTVLSAFDGEAVTASSHAAQTSPQTSPQTTAQNAPQTTGETNPQAASPADLQEIPQVAGQTATQTAGQTSPQTTTAGKGEAR

SEQ ID NO: 93809 - protein, 381 aa, Egibacter rhizosphaerae
  misc_feature (1)..(381): tr|A0A411YLE8|A0A411YLE8_9ACTN Isochorismate synthase O S=Egibacter rhizosphaerae OX=1670831 GN=ER308_12775 PE= 4 SV=1
MVGWGEAARLPVGTGPGRFDAARDSLAGLAAYTPVDDPLDRPGTGLVATTSWAFEDDGPSVLSVPATVVGSRGGQRWVTAIGPPGDPRLEDPSAALPGPAPVRPHGRVRYAGASQSELAWLDAVARATAEIRDHAGGEPLTKVVLARDRVVWAREPFDTRLLLQRLADRFPSCFVFAIDGLVGATPELLIGRDGRSARSLVLAGTAPRGRDEVEDAELGARLLASAKDRDEHRPSVDSVREAFDGIAEDLAVDPEPWLLRLANVQHLATDVRVHLREPAPDLLELAARLHPPAAVCGSPRDAARATIRRLEQLDRGRYAAPVGWVDPSGDGELGIALRCAEVDGARARLFAGAGIVAGSLPEAELEETRHKLRAMQSAIEG

SEQ ID NO: 93810 - protein, 326 aa, Elizabethkingia meningoseptica
  misc_feature (1)..(326): tr|A0A376DZC9|A0A376DZC9_ELIME Isochorismate synthase e ntC OS=Elizabethkingia meningoseptica OX=238 GN=entC PE =4 SV=1
MILFKFPFKEFFYTLNNNTSLENTIRFHSFDNLREIIFSGSYQPITKEEILNLNITSQNLQQEYQSPPESKDEYISRIENVIGIIKDNQLPKVVISRQKWVPISEHETIDLGSTFLKLCKDYPNAFIHLFADKDEAWIGATPEVLGQYNKITKDFETMSLAGTLPVSEEWSEKEIEEQKPVSTYIQSVLGRYSQQVKISPVYDHISGNIKHLRNDFKAVINRHNISDLIKELHPTPAVCGVPKEQCSEIIENNEKYNRAFYAGYIQTEQDNEITCFVNLRCAQLFRNGILLYAGGGITALSEPEKEWKETEMKADAVLQRLTFLGT

SEQ ID NO: 93811 - protein, 326 aa, Elizabethkingia miricola
  misc_feature (1)..(326): tr|A0A0D5BTH9|A0A0D5BTH9_ELIMR Isochorismate synthase E ntC OS=Elizabethkingia miricola OX=172045 GN=entC PE=4 SV=1
MILFKFPFKEVFYTLNSDTPLKNTIKFHSFDNQKEITFDGSFQPITEQEILNLNITSQNIQQEYHGTPETKNEYLARIENVIGIIKENQLPKVVISRQKWVDTPEHETIDLGKTFLKLCKDYPNAFIHLFVDKNEAWIGATPEVLGQYNKITEDLETMSLAGTLPVSEDWSEKEIEEQKPVSIYIQSVLSRYSQQVEISPVYDHISGNIKHLRNDFKAVVSGQDISTLIKELHPTPAVCGVPKDLCSEIIKKTEKYNRAFYAGYIQTEQDNETTCYVNLRCAQLFRNGILLYAGGGITALSEPEKEWKETEMKADAVLQRLTFLGA

SEQ ID NO: 93812 - protein, 340 aa, Empedobacter brevis
  misc_feature (1)..(340): tr|A0A3P6MJU2|A0A3P6MJU2_9FLAO Menaquinone-specific iso chorismate synthase OS=Empedobacter brevis OX=247 GN=me nF PE=4 SV=1
MFRQFQDKLERLIQQKKPFVLFRKPNETKVELWENQEKKTARKFSCNSFDNSTLIEFNDDEVVEILIDDLPKIELLLPISTQNEAISYNDYINLIEKTVEELKSDSDTQKIVISRIKELDKHDIDLSETFKNLHQHYPNAYVYLRYDVEEGCWIGASPELLLKEENQLIQTVSLAGTKAKEDDWTDKEYHEQQVVTDYITATLSGFTNYIDVDGPFSVNAGFFEHLKSFISAQLIDKDKLYDVLKALHPTPAVGGMPKDLAKDFIIKNEGYNRTFYAGFMGYETETEAEFFVNLRCAKIYQNKVKLYVGGGIMPDSIPENEWNETELKSKTIGELLIELK

SEQ ID NO: 93813 - protein, 341 aa, Empedobacter falsenii
  misc_feature (1)..(341): tr|A0A427BJG8|A0A427BJG8_9FLAO Isochorismate synthase O S=Empedobacter falsenii OX=343874 GN=EGI89_12005 PE=4 S V=1
MFKKFQDKLERLIQNQKPFLLFRKPNSIQVELWENKEIKSDNKFICNSFDNTKLIEFNDDEIVEISIDELPNFELSLPESDQNEAISYENYIDLIQKTVEELQSDSPTKKIVISRINSLPETNINLVETFKNLHQHYPNAYVYLRFDTEEGCWIGASPELLLKENNQFIQTVSLAGTKAKEDEWTEKEYHEQQVVTDYISSTLEPYTSYIDVDGPFSVNAGFFEHLKSFISAQLKDKSQLYDLLKALHPTPAVGGMPKDLSKDFILENEGYNRTFYAGFMGFQNKTESEYFVNLRCAKIYSNKVNLYVGGGIMPDSIPENEWRETELKSKTIGELLVKTEN

SEQ ID NO: 93814 - protein, 381 aa, Empedobacter haloabium
  misc_feature (1)..(381): tr|A0A5C7BZZ3|A0A5C7BZZ3_9FLAO Isochorismate synthase O S=Empedobacter haloabium OX=592317 GN=E7V67_10955 PE=4 SV=1
MATSLFLSRHRSVRASGVFERIATPAAGGALHAELARALLRARDAGIADPIVIGAIPFDTTQPSELLVPERSEIFDRDTLPQLAALPLAPVVASTSIPGEERFKQGVRQAVANFTHSEIRKAVLSRVLEVELAGRADPAAIFASLAAQNPTGFQFRIPLASGAELVGVSPELLLRKEGAQIVSNPLAGSARRQPDADSDAAAGGALLQSPKDLREHRYVTDDIRRLLVPLCASLDVPEQPSLLSTNAMWHLSTRIEGTLRDPAQTSLQLACHLHPTPAVCGYPTDLARKLIDLVEPFDRGLFAGVVGWCDAHGNGEWAVTIRCGTVQGNTIRLFAGAGIVADSCPEAEWAETQGKLGTMLRALGAARPAVSANVETAAEAA

SEQ ID NO: 93815 - protein, 340 aa, Empedobacter sp.
  misc_feature (1)..(340): tr|A0A4Z1BSA4|A0A4Z1BSA4_9FLAO Isochorismate synthase O S=Empedobacter sp. MRS2 OX=2491114 GN=E4J94_06350 PE=4 SV=1
MFKKFQDKLERLIQNQKPFLLFRKPNSIQVELWENKGFESDNKFICNSFDNTKLIEFNDDEVVEISIDELPNFELSLPKSDQNEAISYENYIDLIQKTVQELQSESPTKKIVISRINSLPETNINLVETFKNLHQHYPNAYVYLRFDAEEGCWIGASPELLLKENNHFIQTVSLAGTKAKEDEWTEKEYHEQQVVTDYISSTLEPYTSYIDVDGPFSVNAGFFEHLKSFISAQLKDKSQLYDLLKALHPTPAVGGMPKDLSKDFILKNEGYDRVFYAGFMGYQNKTESEYFVNLRCAKIFSNKVNLYVGGGIMPDSIPENEWRETELKSKTIGELLVKSN

SEQ ID NO: 93816 - protein, 403 aa, Emticicia sp.
  misc_feature (1)..(403): tr|A0A4Q5M1Z9|A0A4Q5M1Z9_9BACT Isochorismate synthase O S=Emticicia sp. 17J42-9 OX=2492393 GN=EWM59_07055 PE=4 SV=1
MTTTNLKTSTYRQTLWNAALESGFPTAMWRLPKQNDKHFLTSFLKNPEQIKIEFEELGPGFAFSPFINPDGNDTYFLKADLHYIFSDAATSENETFQEIIVPASVDPDFIDLLNAQPSTKPFFSLKNGAVANTTSSEEFIEEVNTAINDIEAGKFKKVVLSRTKNFSIPTDFEIVTVFDKLCVAYPNAFVSVVSIPSLGMVWMGASPETLVSQDAQGIFRTMALAGTQSAFDADGNLIKPSEALWRQKEIEEHALVSRYIVSCLKKIRVREFEEEGPKTVIAGNLMHLRMDFIVDTVEINFPEMATVMLDLLHPTSAVCGMPKEPARQFILANEKYDREFYSGFLGPVNIQQESHIFVNLRTMKLQNGIATLYAGCGITADSNAEKEWIETEMKLQTLGKFLV

SEQ ID NO: 93817 - protein, 258 aa, Unknown
  misc_feature (1)..(258): tr|G2DA41|G2DA41_9GAMM Menaquinone-specific isochorisma te synthase OS=endosymbiont of Riftia pachyptila (vent Ph05) OX=1048808 GN=menF PE=4 SV=1
MQQAKESIRNSDLEKVVLTRQIRVEAQRRLDPGRLMATLDCLYPSSRHLAFRIGEHSFVAATPERLLACQGSQINCDAIGGTSRRSADEREDKILGESLLNNPKALHEHALVVDTIQHALTPICSRFEPSSGPQLLPLRGLQHLHTEIQGSLKPDTSLLQAAARLHPTGAVNGVPTAVASQWLAQHEALERGWYTGAAGWINAEGDGELAVLLRCALLDGSQAHLYAGAGITAGSDPDAEFDETELKLAAMLEALENA

SEQ ID NO: 93818 - protein, 419 aa, Endozoicomonadaceae bacterium
  misc_feature (1)..(419): tr|A0A3S3Q8G3|A0A3S3Q8G3_9GAMM Isochorismate synthase O S=Endozoicomonadaceae bacterium GTF-13 OX=2506149 GN=DZ C74_11670 PE=4 SV=1
MPLLQLEEPLGGLATEALVPWLQASDRFPRMLWQSRDGQLTVAALGLASRFKAPQEHPTHARRIWCVAGFDANQSWNGYPAHLSYIPEIELEHSPAGWTLRISLGPETSVEQLQRSLATLHRISPEPDAGLPPVVAPVRHQPQQPQWCQQVGAVQRAIADGELQKVVLARQSSLRFEAAPSLWSLYRSWSQQALNCYRFVFEPAPGDGFISLSPERLMQRSGDQLLTEALAGTAPRPSQSAEARDASLELLADSKNRHEHQLVIEDIQHKLASIGLSCSQRCETSVLQQRGIQHLHQLLQGYANPMPADTLIAHTLHPTAAVGGLPGEAASRFLCHNESLVRGWYAGYCGYLAPAAAELAVTIRSARLQGNELQLFAGAGIVALSDPLAEWQELDQKIALPLSLFVPGEEHVSRRTSLS

SEQ ID NO: 93819 - protein, 467 aa, Endozoicomonas montiporae
  misc_feature (1)..(467): tr|A0A142BEV6|A0A142BEV6_9GAMM Isochorismate synthase O S=Endozoicomonas montiporae CL-33 OX=570277 GN=menF PE= 4 SV=1
MQEVNIHTPVLTKRLQQLLHKPAPGVPFVRIEQPVPVCNLLTWLEHQNAHLQRSYWRDRDADIEIATLGQCWKMPIPSRQELSKATNTVQRLINDSGHWAEKARSLLWLSFSDVDRMVWPTFGYGCVYLPGIEMQLTRKGATLACYIQAGTDELWQSGIRSTLKQLDAINWQVTGAREAYQLGPVQYQPDQAGWNGNIAKATRAFAAGEMQKVVLSRSASLTIEGVFSPWRLLQRWRTANPRSYVFAVEAKCGDLFFGCTPERLMARRGRVLHTEALAGTTPRGGTREEDKVLEQTLLSDRKNIHENRLVLNDIRERLGVLCQSLEADRSHSVVKLKSIQHLRYLIRGVLHAGVTDAQLLTALHPTPAVGGTSREVAMSFIEQREGYARGLYAGVFGIVSPEHTEMAVTIRSGLLRRLSDNLQQLSLFSGGGIVQGSVAAEEWQELNNKLATVYSLLKDAEQETVAL

SEQ ID NO: 93820 - protein, 419 aa, Endozoicomonas sp.; identical to SEQ ID NO: 93818
  misc_feature (1)..(419): tr|A0A3P3VJN2|A0A3P3VJN2_9GAMM Isochorismate synthase O S=Endozoicomonas sp. GTF13 OX=2528527 GN=D0544_11695 PE =4 SV=1

SEQ ID NO: 93821 - protein, 440 aa, Enterobacillus tribolii
  misc_feature (1)..(440): tr|A0A370R2G7|A0A370R2G7_9ENTR Isochorismate synthase M enF OS=Enterobacillus tribolii OX=1487935 GN=menF PE=3 SV=1
MVQIPVLIARAIPLLHQAAADKPGLVRVSVPCSLRDGALLLDWLAAQPLYPQFYWRQRDGSEEAAVCGSVRTFRDSRQARDFIREHNEPELRIWGLNAFDQMTLEAFGTLDSLLFVPRIALIRHAGNAELVVYLCSDTSLRDDLPLALAALESLCAAQPLPVLRANVTDVHHQPEKEAWCDLLRQALDAIARKAFEKVVLARRTTLTLDAPLNAAQFLAASRQVNHRCYHFMLALAPEQAFLGSSPERLYRRHHLTLETEALAGTVGSGENDAQAQENARWLMNDGKNQHENLLVVDDICQRLQGGAETLDVMPAEIVRLRKVQHLRRPIHATLLQEDDADCLLRLQPTAAVAGLPREPARRFIRDEEPFERGWYAGTAGYLSLHRAEFCVALRSALIQERQIHLYAGAGIVAGSDPQEEWLEIESKAAGLRTLLDNDAG

SEQ ID NO: 93822 - protein, 204 aa, Enterobacter agglomerans
  misc_feature (1)..(204): tr|A0A379AMC7|A0A379AMC7_ENTAG Isochorismate synthase e ntC OS=Enterobacter agglomerans OX=549 GN=entC_2 PE=4 S V=1
MQRIVAQNPNSYHFHLPLPDGGALVGASPELMIRKQGRQFSSCPLAGSAPRHRDPQRDQASGDSLMHSAKDRHEHKLVTDAMRATLQPRSRLLSVPETPSLLTTATLWHLATQIQGDVLDDRENALSLACLLHPTPALSGFPHQRAQALIQRLEPFERQLFGGIVGWCDDQGNGEWGRHHSLRYGEWPAGAAVCGRRHRSGLTT

SEQ ID NO: 93823 - protein, 431 aa, Enterobacter asburiae
  misc_feature (1)..(431): tr|A0A263VXQ6|A0A263VXQ6_ENTAS Isochorismate synthase M enF OS=Enterobacter asburiae OX=61645 GN=menF PE=3 SV=1
MNSIFLALEQLRTQLSQALPAAPGIRHFDVSFPLNDAFDPLAWLGEQQCYPQFYWQQRNGDEELAALGAVNQFSSLALASQFLREQNAAQDTRICGLNAFNPEQGSLFLPRLLWRRTAGNATLRLQLWSDRSLVEDARAALDFLQRLRPAKSIRPLSVQVEHETHQPQQAEWLKLIRRATETIARGEFEKVVLARATDLQFTQRVNPVALMAASRALNLHCYHFCMVFDASNAFLGSTPERLWRRRGKLLRTEALAGTVASHIDDSQAQRLGEWLLNDDKNQRENMLVVEDICQRLQRSTRMLEVLPPQVVRLRKVQHLRRCIWTELKQADDEQCLLMLQPTAAVAGLPRQPAREFIQKVEPFNREWYAGSAGYLSPEQSEFCVALRSARVQEDSLRLYAGAGIVSGSDPEQEWQEIENKAAGLRSLLLRD

SEQ ID NO: 93824 - protein, 431 aa, Enterobacter bugandensis
  misc_feature (1)..(431): tr|A0A3S0GB79|A0A3S0GB79_9ENTR Isochorismate synthase M enF OS=Enterobacter bugandensis OX=881260 GN=menF PE=3 SV=1
MNSIFLALEQLRSHLSQALPATSGLRHFDVSFPLNDAFDPLAWLGEQQCYPQFYWQKRNGDEELAALGAVVQFSSLALASQFLSAQHGPEDTRICGLNAFNPEQGSLFLPRLLWRRTAGNATLRLQLWSDSSLEDDADTARAFLQQLLPARPIRPLSVQVDRETHHPEKPQWLSLIGKATETIARGDFEKVVLARATDLQCKQRVNPVALMAASRALNLNCYHFCMIFDASNAFLGSTPERLWRRRGKLLRTEALAGTVASHTDDKQAQRLGEWLLNDDKNQRENMLVVEDICQRLQHHTQTLEVLPAQVVRLRKVQHLRRCIWTELKQADDELCLHVLQPTAAVAGLPRQPAREFIQHVEPFNREWYAGSAGYLSPEQSEFCVALRSARVQEDALRLYAGAGIVSGSDPEQEWQEIENKAAGLRSLLLRD

SEQ ID NO: 93825 - protein, 428 aa, Enterobacter cancerogenus
  misc_feature (1)..(428): tr|D2ZEW4|D2ZEW4_9ENTR Isochorismate synthase MenF OS=E nterobacter cancerogenus ATCC 35316 OX=500639 GN=menF P E=3 SV=1
MSIALERLRSQLAQALPATPGLRHFDVSFPLNDAFDPLAWLGVQVCYPQFYWQQRNGDEELSALGAVIHFPSLASASQFLHSHPQQADTRICGLNAFNPEQGSLFLPRLLWRRHAGVATLRLQLWSETSLQDDARTALAFLDALREARPISPLSVQVLHETHHPQKPEWLRLVQQATDAIAQGDFEKVVLARATDLQFNRPISAVALMAASRAVNLRCYHFCMVFDAHNAFIGSTPERLWRRRGALLRTEALAGTVAGHPDDRQAQRLGEWLLNDDKNQRENMLVVEDICQRLQHHTRTLEVLPAQVVRLRKVQHLRRCIWTELKQADDERCLHVLQPTAAVAGLPRQPAREFIDNNEPFDREWYAGSAGFLSPERSEFCVALRSARIHDDTLRLYAGAGIVSGSDPEQEWQEIENKAAGLRSLLLRD

SEQ ID NO: 93826 - protein, 431 aa, Enterobacter chengduensis
  misc_feature (1)..(431): tr|A0A0F4B563|A0A0F4B563_9ENTR Isochorismate synthase M enF OS=Enterobacter chengduensis OX=2494701 GN=menF PE= 3 SV=1
MNSIFLALEQLRTQLTQALPAAPGLRHFDVTFPLNDAFDPLAWLGAQQCYPQFYWQQRNGDEELAALGAVAHFSSLALACQFLRDQNAPDDTRICGLNAFNPEQGSLFLPRLLWRRTAGNATLRLQLWGNSSLQDDARAAQVFLQQLLAAKPIRPLSVQVEHETHLPQKSAWLSLINKATETIAHGDFEKVVLARATDLQCKQRVNPVALMAASRALNFNCYHFCMVFDASNAFLGSTPERLWRRRGALLRTEALAGTVASHADDSQAQRLGEWLLNDDKNQRENMLVVEDICQRLQHHTQTLEVLPAQVVRLRKVQHLRRCIWTELKQADDALCLHVLQPTAAVAGLPRQPAREFIQAVEPFNREWYAGSVGYLSPEQSEFCVALRSARVREDSLRLYAGAGIVSGSDPEQEWQEIENKAAGLRSLLLRD

SEQ ID NO: 93827 - protein, 431 aa, Enterobacter chuandaensis
  misc_feature (1)..(431): tr|A0A3A3ZEG1|A0A3A3ZEG1_9ENTR Isochorismate synthase M enF OS=Enterobacter chuandaensis OX=2497875 GN=menF PE= 3 SV=1
MNSIFLALEQLRTQLSQALPATSGLRHFDVSFPLNDAFDPLAWLGEQQCYPQFYWQQRNGDEELAALGAVTQFSSLALASQFLSAQHAPDDTRICGLNAFNPEQGNLFLPRLLWRRTAGHATLRLQLWSDSSLEDDADTARAFLQYLLPARPIRPLSVQVKRETHYPEKPQWLSLIRKATETIAHGDFEKVVLARATDLQCRQRVNPVALMAASRALNLNCYHFCMIFDASNAFLGSTPERLWRRRGTLLRTEALAGTVASHTDDKQAQRLGDWLLNDDKNQRENMLVVEDICQRLQHHTQALEVLPAQVVRLRKVQHLRRCIWTELKQADDELCLHVLQPTAAVAGLPRQPAREFIQHVEPFNREWYAGSAGYLSPEQSEFCVALRSARVQDDALRLYAGAGIVSGSDPEQEWQEIENKAAGLRSLLLRD

SEQ ID NO: 93828 - protein, 391 aa, Enterobacter cloacae
  misc_feature (1)..(391): tr|A0A155Y900|A0A155Y900_ENTCL Isochorismate synthase O S=Enterobacter cloacae OX=550 GN=entC PE=4 SV=1
MDTSLAEDLQHTATTLQSDSFFFMSPYRSFTTSGCFARFSEPAVGGDDPAGPFQQKLAQAFQNAKNSGIAHPVMVGAIPFDTRKPSSLFIPQRWQTFSRPARQQSARYASGAQTLNVQQRTEIPPQPVFEEMVARAASLTATPQVNKVVLSRLIDIATDKQIDSSALMERLIAQNPASFNFHVPLEDGGVLLGASPELLLRKEGAHFSSLPLAGSARRQPDDVLDREAGTKLLASEKDRHEHDLVTQAMKTILEPRSHHLTMPASPQLITTPTLWHLATPVEGDARENENALTLACLLHPTPALSGFPHQAAKELIAELEPFDRELFGGIVGWCDSEGNGEWVVTIRCARLHQNTVRLFAGAGIVPASSPVGEWRETGVKLSTMLNVFGLH

SEQ ID NO: 93829 - protein, 431 aa, Enterobacter genomosp.
  misc_feature (1)..(431): tr|A0A0X4EC84|A0A0X4EC84_9ENTR Isochorismate synthase M enF OS=Enterobacter genomosp. O OX=2364150 GN=menF PE=3 SV=1
MNSIFLALEHLRTQLTQALPAAPGIRHFDVSFPLNDAFDPLAWLGAQQCYPQFYWQQRNGDEELAALGAVTHFSSLAIASQFLREQNAAGDTRICGLNAFNPEQGSLFLPRLLWRRTAGNATLRLQLWSERSLQDDAFAARDFLQQLQPARPIRPLAVQVEHETHQPQQAEWLRLVHRATETIARGDFEKVVLARATDLQFTRRINPVALMAASRALNLHCYHFCMVFDASNAFLGSTPERLWRRRGRLLRTEALAGTVASHNDDKQAQRLGEWLLNDDKNQRENMLVVEDICQRLQHHTQTLEVLPAQVVRLRKVQHLRRCIWTELKQADDEQCLNMLQPTAAVAGLPRQPAREFIQKVEPFNREWYAGSAGYLSPDQSEFCVALRSARVLEDSLRLYAGAGIVSGSDPEQEWQEIENKAAGLRSLLLRD

SEQ ID NO: 93830 - protein, 431 aa, Enterobacter hormaechei
  misc_feature (1)..(431): tr|F5S0D0|F5S0D0_9ENTR Isochorismate synthase MenF OS=E nterobacter hormaechei ATCC 49162 OX=888063 GN=menF PE= 3 SV=1
MHSIFLALQSLRTQLAQALPATPGLRHFDVSFPLNDAFDPLAWLGVQRCYPQFYWQQRSGDEELAALGSLARFDSLASASRFLHTHDVAHDTRICGLNAFNPAQGVLFLPRLLWRRSAGVATLRLQLWSETSLCEDAREALNFIDNLRDAAPIRPLSVQIVQETHHPEKPEWLALIRQATETLARGDFEKVVLARATDVQCQQPVNAIALMAASRALNLNCYHFCMVFDASNAFLGSTPERLWRRRGTLLRTEALAGTVASHSDDKQAQRLGDWLMNDDKNQRENMLVVEDICQRLQHYTRTLEVLPAQVLRLRKVQHLRRCIWTELIQPDDEQCLHILQPTAAVAGLPRQAAREFIANVEPFDREWYAGSAGYLSPDQSEFCVALRSARVRDDALRLYAGAGIVSGSDPEQEWQEIENKAAGLRSLLLRD

SEQ ID NO: 93831 - protein, 431 aa, Enterobacter huaxiensis
  misc_feature (1)..(431): tr|A0A428LLR8|A0A428LLR8_9ENTR Isochorismate synthase M enF OS=Enterobacter huaxiensis OX=2494702 GN=menF PE=3 SV=1
MHSIFLALERLRTQLAQALPATPGLHHVDVSFPLNDAFDPLAWLGAQRIYPQFYWQQRNGDEELAALGSVAHFDSLASASQFLQTHDAQNDTLICGLNAFNPEKSSLFLPRLLWRRSAGVATLRLQLWSDTSLADDAPAARRFLDQLNAAGPIRPLSVQVERETHQPQKPEWLRLIRQATDAIARGDVEKVVLARATDLQFRQPVNAVALMAASRALNVNCYHFCMVFDAGNAFLGSTPERLWRRRGTLLRTEALAGTVASHSDDKQAQRLGEWLMNDDKNQRENMLVVEDICQRLQHHTQTLEVLPAQVVRLRKVQHLRRCIWTALKHASDEQCLNALQPTAAVAGLPRQAAREFIQKVEPFDREWYAGSAGYLSREQSEFCVALRSARVHEAMLRLYAGAGIVSGSDPEQEWQEIENKAAGLRSLLLRD

SEQ ID NO: 93832 - protein, 391 aa, Enterobacter kobei
  misc_feature (1)..(391): tr|A0A5C1XMY3|A0A5C1XMY3_9ENTR Isochorismate synthase E ntC OS=Enterobacter kobei OX=208224 GN=entC PE=4 SV=1
MDTSLAEEVQHTATTLPSDSFFFMSPYRSFTTSGCFARFSEPAVGGDDPAGHFQQKLAQAFRNAKASGIAHPVMVGAIPFDTRKPSSLFIPQRWQTFSRPARQQSARYFSGSQALKVQQRTEIPAQSVFEEMVARAASLTATPRVNKVVLSRLIDIAADKKLDSGALMERLIAQNPASFNFHVPLEDGGVLLGASPELLLRKEGAHFSSLPLAGSARRQPDDVLDREAGNKLLASEKDRHEHDLVTQAMKAILEPRSHHLSMPSSPQLITTPTLWHLATPVEGEARENENALTLACLLHPTPALSGFPHQAAKALIAELEPFDRELFGGIVGWCDSEGNGEWVVTIRCARLHNNTVRLFAGAGIVPASSPVGEWRETGVKLSTMLNVFGLH

SEQ ID NO: 93833 - protein, 430 aa, Enterobacter lignolyticus
  misc_feature (1)..(430): tr|E3GB50|E3GB50_ENTLS Isochorismate synthase MenF OS=E nterobacter lignolyticus (strain SCF1) OX=701347 GN=men F PE=3 SV=1
MLSISVALESLQGFLSDELPDAPGTRFVDIPFALNDAFDPLAWLCCQPVWPQFYWQQRNGDEEVAALGAVRRFAALPQADHFLQQPAAADLRVWGLNAFAPEQGALFLPRLEWRRSAGKASLRLTLSSDTSLRQDAQRARDMLSQLLPGGALPELSLSLKSERHHPDRAGWFRLIAQATDAIAAGELDKVVLARATDLRFSQPLCAGAIMAASRRVNLHCYHFYMAFDADSAFLGSSPERLWRRRGNLLRTEALAGTVASHPDERQAQHLANWLMYDDKNQRENMLVVEDICQRLQDDVQALEVLPPQVVRLRKVQHLRRCIWTTLTSPDDARCLLQLQPTAAVAGLPRDVARRFIEHHEPFVREWYAGSAGYLSRERSEFCVALRSAKVTGDTLRLYAGAGIVRGSDPEQEWQEITNKAAGLRSLVLDD

SEQ ID NO: 93834 - protein, 431 aa, Enterobacter ludwigii
  misc_feature (1)..(431): tr|W0BM60|W0BM60_9ENTR Isochorismate synthase MenF OS=E nterobacter ludwigii OX=299767 GN=menF PE=3 SV=1
MNSISTALEHLRSQLTQALPTAPGLHHFDVSFPLNDAFDPLAWLGVQHCYPQFYWQQRNGDEELAALGAVAHFSSLACASQFLQAHDAARDTRICGLNAFNPEQGSLFLPRLLWRRTAGQATLRLQLWSDSSLHDDARAALDFLQQLGEARPIRPLSVEVVQEKHHPEQPEWLRLIRKATQTIARGDFEKVVLARATDLQFKHSVNPVALMAASRALNLNCYHFCMVFDASNAFLGSTPERLWRRRGKLLRTEALAGTVASHTDDKQAERLGDWLMNDDKNQRENMLVVEDICQRLQHHTQTLEVLPAQVVRLRKVQHLRRCIWTELKHADDAQCLHVLQPTAAVAGLPRQAARDFIYHNEPFDREWYAGSAGYLSPEQSEFCVALRSARVYEDALRLYAGAGIVSGSDPEQEWQEIENKVAGLRSLLLRD

SEQ ID NO: 93835 - protein, 431 aa, Enterobacter mori
  misc_feature (1)..(431): tr|A0A2J0NJB6|A0A2J0NJB6_9ENTR Isochorismate synthase M enF OS=Enterobacter mori OX=539813 GN=menF PE=3 SV=1
MHSIFLALEQLRTRLAQALPATPGLRHFDVSFPLNDAFDPLAWLGAQQCYPQFYWQQRSGDEELAALGAVIHFSSLALASQFLHTQHAAGDTRICGLNAFSPEKGSLFLPRLLWRRSGGVATLRMQLWSECSLQDDAQVALRFLDSLQHAKPIRPLSVQVERETHQPQKPEWLRLIRQATETIAHGEFEKVVLARATDLQCHQPVNAVALMAASRALNLNCYHFCMVFDASNAFLGSTPERLWRRRGTLLRTEALAGTVASHADDAQARRLGEWLMKDDKNQRENMLVVEDICERLQHHTQTLEVLPAQVVRLRKVQHLRRCIWTELKHADDEQCLHVLQPTAAVAGLPRQAARAFIQNVEPFDREWYAGSAGYLSPEQSEFCVALRSARVHGAALRLYAGAGIVSGSDPEQEWQEIENKAAGLRSLLLRD

SEQ ID NO: 93836 - protein, 431 aa, Enterobacter roggenkampii
  misc_feature (1)..(431): tr|V3EKW2|V3EKW2_9ENTR Isochorismate synthase MenF OS=E nterobacter roggenkampii OX=1812935 GN=menF PE=3 SV=1
MNSIFLALEQLRTQLSQALPATPGIRHFDVSFPLNDAFDPLAWLGAQQCYPQFYWQQRNGDEELAALGAVITFSSLALATQFLREQNAAGDTRICGLNAFNPEQGSLFLPRLLWRRTAGTATLRLQLWSDYSLQEDAHAARDFLQQLQPARPIRPLAVQVEHENHQPQRAEWLKLVRRATETIARGDFEKVVLARATDLQFTQRINPVALMAASRALNLHCYHFCMVFDASNAFLGSTPERLWRRRGTLLRTEALAGTVASHTDDKKAQRLGEWLLNDDKNQRENMLVVEDICQRLQHSTQTLEVLPAQVVRLRKVQHLRRCIWTELKQADDEQCLHMLQPTAAVAGLPRQPAREFIQKVEPFNREWYAGSAGYLSPDQSEFCVALRSARVQDDSLRLYAGAGIVSGSDPEQEWQEIENKAAGLRSLLLRD

SEQ ID NO: 93837 - protein, 431 aa, Enterobacter sichuanensis
  misc_feature (1)..(431): tr|A0A0F1AS97|A0A0F1AS97_9ENTR Isochorismate synthase M enF OS=Enterobacter sichuanensis OX=2071710 GN=menF PE= 3 SV=1
MHSISTALERLRTQLAQALPAIPGLRHFDVSFPLNDAFDPLAWLGAQQCYPQFYWQQRNGDEELAALGAVTRFSSLTEASQFLRAQHAAGDTRICGLNAFNPEQGSLFLPRLLWRRSAGHATLRLQLWSDSSLQDDALAARDFLQQLRPAKPVRPLSVQVEHETHQPQQPEWLRLVCKATDTIARGDFEKVVLARATDLQFTQRVNPVALMAASRALNLNCFHFCMVFDASNAFLGSTPERLWRRRGKLLRTEALAGTVSSHPDDKQAQRLGEWLLNDDKNQRENMLVVEDICQRLQRHTQTLEVLPPQVVRLRKVQHLRRCIWTELKQADDEQCLHMLQPTAAVAGLPRQPAREFIQKVEPFNREWYAGSAGYLSPDQSEFCVALRSARVQEDSLRLYAGAGIVSGSDPEQEWQEIENKAAGLRSLLLRD

SEQ ID NO: 93838 - protein, 431 aa, Enterobacter soli
  misc_feature (1)..(431): tr|A0A198GDE4|A0A198GDE4_9ENTR Isochorismate synthase M enF OS=Enterobacter soli ATCC BAA-2102 OX=1354262 GN=me nF PE=3 SV=1
MQSIFIALERLRDQLAQALPATPGLRHFDVSFPLNDAFDPLAWLGSQTCYPQFYWQQRNGDEELAALGAVVHFSSLASAAQFLNACDAPDTTRICGLNAFNPAQGSLFLPRLLWLRNAGIATLRLHLWSATSLQDDAHQALDFLQQLGETRPIPALALQALRETHQPDKPEWLRLVRLATQTIAHGGFDKVVLARATDVQFNQRVNAIALMAASRALNLHCYHFCMVFDASNAFLGSTPERLWRRRGMLLRTEALAGTVASHAEDKQAKRLGDWLMNDDKNQRENMLVVEDICQRLQHHTRTLEVLPAQIVRLRKVQHLRRCIWTALKHTDDEQCLHVLQPTAAVAGLPRQAASEFIENNEPFDREWYAGSAGYLSPGQSEFCVALRSARLHNDALRLYAGAGIVSGSDPEQEWLEIENKAAGLRTLLLRD

SEQ ID NO: 93839 - protein, 431 aa, Enterobacter sp.
  misc_feature (1)..(431): tr|A4WCQ0|A4WCQ0_ENT38 Isochorismate synthase MenF OS=E nterobacter sp. (strain 638) OX=399742 GN=menF PE=3 SV= 1
MHSISIALERLGDFMQQDIPATPGLRHFDVSFPLNDAFDPLAWLGAQIAYPQFYWQQRNGDEELAALGAAEHFSTLSAARQFLNNRHACAETRICGLNAFTPEQSHLFLPRLLWQRTGGMASLRLNLSSNVSLQDDARRALEFLQQLQTIRPITTLSSQIVRETHLPARPEWLSLVSQATDAIAHGEFEKVVLARATDLHFDQRVNAIALMAASRRINHNCYHYCMIFDAQNAFMGSSPERLWRRRGTLLRTEALAGTVASHADDAQSHRLGEWLLNDDKNQRENMLVVEDICERLQHHTQALEVLPAQVVRLRKVQHLRRCIWTELNLADDEQCLHLLQPTAAVAGLPRDSARAFIQRNEPFEREWYAGSAGYLSPEQSEFCVTLRCARVSHTAVRLYAGAGIISGSVPEEEWQEIENKAAGLRTLLLMD

SEQ ID NO: 93840 - protein, 457 aa, Enterobacterales bacterium
  misc_feature (1)..(457): tr|A0A389MCV1|A0A389MCV1_9GAMM Isochorismate synthase M enF OS=Enterobacterales bacterium OX=1993870 GN=menF PE =3 SV=1
MKQISAILDQLDTALSGDFPDEAGLRQFSYTLADQPENGMLEWLNMQACYPKFYWQQRDENEESALCGDARTFGSLTAAQAFLQQFPQLPELRVWGLNAFNGADDVAADTNALFLPRIEINRQGGVCTLFCNLYSANSLRGEAKRMRTFVHSLVNRRPLPTLTSQVLQHQHLPTEPQWKQIIHRALNSIEQGQFDKVVLARKTTLTLSQPLNAAAFLAASRAVNHDCYHFMLAFTAQQAFLGSSPERLFMRENHELCTEALAGTVASAVESRQAHALGQWLLKDAKNQRENMLVVDDICQRLQGSAHSLDVMPAEILRLRKVQHLRRSIHAVLTHADDANCLQRLQPTAAVAGLPRQAAREFITQHEPFDRQWYAGSAGFISLARSEFAVALRSAAVKGRELMLFAGAGIVAGSDASQEWQEIENKAAGLRTLLEENVVLVDSVLPQENFAPAVWAG

SEQ ID NO: 93841 - protein, 445 aa, Enterobacteriaceae bacterium
  misc_feature (1)..(445): tr|A0A4S3LLL2|A0A4S3LLL2_9ENTR Isochorismate synthase M enF OS=Enterobacteriaceae bacterium ML5 OX=2507584 GN=m enF PE=3 SV=1
MKQISAIIDQLDATLAGEWPDAAGIRQFSYSLQKQPDTGLLEWLSAQPCYPKFYWQQRDGHDEAAVCGDAYAFGDMQQAQDFIRQHRDIPDLHIWGLNAFNGADAGGRAANALFLPRIELCRSGTTYWLRCTLFSAVSLREEARRTRLFLRSLVASHALPPIMSRVVQHQHLPAEPQWNQLINRALKGIEQQQFDKVVLARKTTLTLSQPLNACAFLAASRAVNHHCYHFMLAFTPQQAFLGSSPERLFLRDHTELFTEALAGTVANHPDLQKARELGEWLLNDGKNQRENLLVVDDICQRLQGGAHSLDVMPAEILRLRKVQHLRRSIHGELTGADDAGCLQRLQPTAAVAGLPRQAAREFIAGHEPFDREWYAGSAGYLSTEQSEFTVALRSAAVKGHHLELYAGAGIVAGSDAAQEWQEIENKAAGLRTLLEEHYTPAVQAG

SEQ ID NO: 93842 - protein, 454 aa, Enterococcus casseliflavus
  misc_feature (1)..(454): tr|F0EJ42|F0EJ42_ENTCA Isochorismate synthase OS=Entero coccus casseliflavus ATCC 12755 OX=888066 GN=HMPREF9087 _1480 PE=4 SV=1
MNSKSSSNYEAAIAAGKTYLSEYQPLKRCDLLALYAAAQEYQGERYFWRTPDETTSLVGLGWLATFSQPKLADFSEVRSLLKQAHYQPEAPLQAQLVGGFAFDEQAEVSQDWAELGAGLFALPEILVSKTDDQCGVVYTVAASSEEQRQQKVAALQEKVASWLNANPDKSLVAETPAFQAQEELEVPQWLQAVEETVAAIRSTETPLKKVVLARRMKIETKQSIISAGVLQRLAQQQPNTYLFAIEHGGHVFAGATPERLLKATVDQFETVSIAGSAPRGKTKEEDEALAQALLADAKNTHEHQVVVDRLETALATLLADGFQSEARSVIKNRDIQHLFVPLAGQRKAGVNFLSAVQKLHPTPALGGEPKEAAVSWIRTHEPASRGMYGGPIGWLGIQEDIGEFAVAIRSGFFSGNQATLYAGCGIVADSDAESERQETRLKFQPMRRGILGDE

SEQ ID NO: 93843 - protein, 361 aa, Enterococcus durans
  misc_feature (1)..(361): tr|A0A557YHJ8|A0A557YHJ8_9ENTE Isochorismate synthase ( Fragment) OS=Enterococcus durans OX=53345 GN=FNV40_1267 0 PE=4 SV=1
KEQPVLFGGFPFNKNNRKTEAFWADLSTGYFVLPSVLIKQVKKELNVVITVKKEGKSLKRLFDEVTDWVQILDQLLEKVTPSFPQTQVLLENELDVATFLQSTKESVEEIRDPRNPVEKVVLARQMDLRMEHFSVERLIDNLIRQQANTYIFALETKKRCFVGATPEHLLHASATHFFTASIAGSTTRGKNDEEDRILGEKLLKNSKNNNEHAIVVKKLTKQLANYTEGNLSVSNKKLLKNRDIQHLYLTISGIRKPKVSLFDVIQALHPSPALGGEPKELAKQWLAKKEPSGRGLYGAPIGWCDIMEDIGEFAVGIRSGVFSENAGRLYAGCGIVGDSDPEEERQETQLKFQPMLRGVKE

SEQ ID NO: 93844 - protein, 455 aa, Enterococcus faecalis
  misc_feature (1)..(455): tr|E6GSP1|E6GSP1_ENTFL Isochorismate synthase OS=Entero coccus faecalis TX0309A OX=749503 GN=HMPREF9506_00746 P E=4 SV=1
MKLPDELRQAYQKNARQFSWVFPLETEQTALAIFAAGEKAYQGERFFWQTPKKDFALVGFGYETILKGAETETHQLNNFLKKEAATRFQNMSISGTGALLFGGLPFDTEQTPTEAWGELGEGWFYLPSILFTFSGSRIYGTLNFSGSSEQEVEERWSTLVAQFDRLLATCEELPAVAETKIDKEEVAVTEWLQAVNETVAVLREDGPLKKVVLARQLAVSSPEKIRSNQVLVNLMAQQQNTYLFALEAKDTSFIGATPERLLLGTKETFATACIAGTIKTGQTPEETKTLGAQLLQDRKNTGEHQIVVERLAKELAKMTTSENSIQAPIILENRDVQHLYVPISGQRKPGISFLESVMQLHPTPALGGEPKELAVEWIRQYEPGSRGLYGAPIGWISGNDDSGEFAVALRSGVFAGQQGVLYAGCGIVADSQAELEREETKIKFQPMLRGIGGQV

SEQ ID NO: 93845 - protein, 453 aa, Enterococcus faecium
  misc_feature (1)..(453): tr|A0A4U9PJX8|A0A4U9PJX8_ENTFC Menaquinone-specific iso chorismate synthase OS=Enterococcus faecium OX=1352 GN= entC PE=4 SV=1
MTTNLFNLNLQEVPEADYVCYSFKIPYEPLANLFAKASDFKGTRFFWQTPDKNVGFLGFGRNLLKKRGNWSTEDLINAKQEFFKKLSFLVPEKETPILFGGLPFDAENKNQAPIWGELAEGCFILPELLIKQNHQQLTVVITASNHFKTLKELDEFIKEKMRLINEMKERCVPDFSPSQILKETEVAVPHFLKAVEETIEVTANKKSALKKVVLARQMQLVGKEFSVEKILLHLISQQPNTYLFVLEAKGQAFIGATPERLLQATDTHFLTASIAGSIARSSNEREDVTSGEKLLKDSKNIGEHQLVVERLTEQMHSFIKGKLTVSEKSLLKNRDIQHLCLTLKGSRQDGFSFLEVIRQLHPSPALGGVPKQAAIDWIAEKEPIGRGLYGGPIGWCSLTEDVGEFAVGIRSGVVSDTEVQLYAGCGIVPDSTPEAEYLETALKFQPMIRGVKE

SEQ ID NO: 93846 - protein, 458 aa, Enterococcus gallinarum
  misc_feature (1)..(458): tr|A0A366U2S7|A0A366U2S7_ENTGA Isochorismate synthase O S=Enterococcus gallinarum OX=1353 GN=EB54_02919 PE=4 SV =1
MNSKSKNEYQHALAAGKKVFSHYYPLAPCDFVQLYAAASQFIGERYFWRSSDQATCFLGIGSVKRYANPSLIDFERQRRTLKKQHFQPNTDQMAATLLGAFAFDEQSQGAAEWGTIGNGLFVLPKILFRKINDVYGVILTVEAKDTNDVETLFGQFADLQQLVEQWGKQAQQPVGACLLQQTELDVPQWVKAVDETVAAIRSAKTPLEKVVLARRMKITTKKEIDSFAVLARLAEQQTNTYLFAFEDEVSFIGATPERLLKATASHFETVSIAGSAPRGSTPAEDQQIADALLTDPKNTHEHQVVVNRLEQALSSLLAEGFHSEARSIIKNRDIQHLFVPLSGKRKPAVSFLEAVAKLHPTPALGGEPKADALAWIRNHEPARRGLYGGPIGWLGIQEDIGEFAVAIRSGVFHGTEGILYAGCGIVADSVAEEERQETALKFQPMLRGVIENESASHD

SEQ ID NO: 93847 - protein, 437 aa, Enterococcus hirae
  misc_feature (1)..(437): tr|A0A449EIC5|A0A449EIC5_ENTHR Menaquinone-specific iso chorismate synthase OS=Enterococcus hirae OX=1354 GN=en tC_5 PE=4 SV=1
MTTNLFNLNLQEVPEADYVCYSFKIPYEPLANLFAKASDFKGTRFFWQTPDKNVGFLGFGRNLLKKRGNWSTEDLINAKQEFFKKLSFLVPEKETPILFGGLPFDAENKNQAPIWGELAEGCFILPELLIKQNHQQLTVVITASNHFKTLKELDEFIKEKMRLINEMKERCVPDFSPSQILKETEVAVPHFLKAVEETIEVTANKKSALKKVVLARQMQLVGKEFSVEKILLHLISQQPNTYLFVLEAKGQAFIGATPERLLQATDTHFLTASIAGSIARSSNEREDVTSGEKLLKDSKNIGEHQLVVERLTEQMHSFIKGKLTVSEKSLLKNRDIQHLCLTLKGSRQDGFSFLEVIRQLHPSPALGGVPKQAAIDWIAEKEPIGRGLYGGPIGWCSLTEDVGEFAVGIRSGVVSDTEVQLYAGCGIVPDSSLKRNT

SEQ ID NO: 93848 - protein, 221 aa, Enterococcus italicus
  misc_feature (1)..(221): tr|E6LE66|E6LE66_ENTI1 Chorismate binding enzyme OS=Ent erococcus italicus (strain DSM 15952 / LMG 22039 / TP 1 .5) OX=888064 GN=menF PE=4 SV=1
MFFSLQRNERIFVGATPERLLAGETDTIYTAAVAGSIERGQTADEDQTLGAALLHSAKNLHEHQIVVDRIRKAIAPFTQNQVTVGERTLLKNRDIQHLYAPIVGKRQAKGPTFLDMIDQLHPTPALGGEPKEAALHWLRHQEPVGRGLYGAPIGWLSLAEDGGEFAVGIRSAVLYKQHALLYAGCGIVADSVAIEERAETSVKFQPMKRGISDEDPATNHD

SEQ ID NO: 93849 - protein, 458 aa, Enterococcus saccharolyticus
  misc_feature (1)..(458): tr|A0A449ERS4|A0A449ERS4_9ENTE Isochorismate synthase O S=Enterococcus saccharolyticus OX=41997 GN=dhbC PE=4 SV =1
MNSKSKNEYQHALAAGKKVFSHYYPLAPCDFVQLYAAASQFIGERYFWRSSDQATCFLGIGSVKRYANPSLIDFERQRRNLKKQHFQPNTDQMAATLLGAFAFDEQSQGAAEWGTIGNGLFVLPKILFRKINDVYGVILTVEAKDTNDVETLFGQFADLQQLVEQWGKQAQQPVGACLLQQTELDVPQWVKAVDETVAAIRSAKTPLEKVVLARRMKITTKKEIDSFAVLASLAEQQTNTYLFAFEDEVSFIGATPERLLKATASHFETVSIAGSAPRGSTPAEDQQIADALLTDPKNTHEHQVVVNRLEQALSSLLAEGFHSEARSIIKNRDIQHLFVPLSGKRKPAVSFLEAVAKLHPTPALGGEPKADALAWIRNHEPARRGLYGGPIGWLGIQEDIGEFAVAIRSGVFHGTEGILYAGCGIVADSVAEEERQETALKFQPMLRGVIENESASHD

SEQ ID NO: 93850 - protein, 458 aa, Enterococcus sp.
  misc_feature (1)..(458): tr|A0A4P9DJW2|A0A4P9DJW2_9ENTE Isochorismate synthase O S=Enterococcus sp. M190262 OX=2582830 GN=FE005_08015 PE =4 SV=1
MNSKSKNEYQQALAAGKKVFSHYYPLAPCDFVQLYAAASQFIGERYFWRSSDQATCFLGIGSVKRYANPSLIDFERQRRNLKKQHFQPNTDQMAATLLGAFAFDEQSQGAAEWGTIGNGLFVLPKILFRKINDVYGVILTVEAKDTNDVETLFGQFADLQQLVEQWGKQAQQPVGACLLQQTELDVPQWVKAVDETVAAIRSAKTPLEKVVLARRMKITTKKEIDSFAVLARLAEQQTNTYLFAFEDEVSFIGATPERLLKATASHFETVSIAGSAPRGSTPAEDQQIADALLTDPKNTHEHQVVVNRLEQALSSLLAEGFHSEARSIIKNRDIQHLFVPLSGKRKPAVSFLEAVAKLHPTPALGGEPKADALAWIRNHEPARRGLYGGPIGWLGIQEDIGEFAVAIRSGVFHGTEGILYAGCGIVADSVAEEERQETALKFQPMLRGVIENESASHD

SEQ ID NO: 93851 - protein, 417 aa, Enterorhabdus caecimuris
  misc_feature (1)..(417): tr|A0A4S4FYB3|A0A4S4FYB3_9ACTN Isochorismate synthase O S=Enterorhabdus caecimuris OX=671266 GN=E5986_10600 PE= 4 SV=1
MGLGRCIALASMRDVEYEYGTGAGSQPYFEAAKPNALDPTIRRTGEFLDAAFSGVHSRAGYADEQPPVFFSFNRFDGTNPAPADDLMASFPQLRFMLPEIVLIENERGRFLQVNSLGPVYPGRVARFQRLVAAAPRRETAFVPVTVESDSRATWQSEMDAALAAITEGRVSKVVLSRRQRVVAARPFSSKDLLVNLIDGDARGTVLLYRYADVFFCGCTPELLVRKQGDHVESMCLAGTCPVGATPEESQVLAEELMADSKNRAEHDYVVQLIRNVLDRVCYAVDVPATPEIMRLAHVQHLFTPARARVLAGVTLADLMEDLHPTPAVAGAPVGEARMLLREIEPYNRGFFAGACGFVDGEGDGEFSVALRTGVFDGEMGWVYGGCGIVAESDAEAEYHEIDLKLRTILSAFGKDAL

SEQ ID NO: 93852 - protein, 417 aa, Enterorhabdus sp.
  misc_feature (1)..(417): tr|A0A4S2FW73|A0A4S2FW73_9ACTN Isochorismate synthase O S=Enterorhabdus sp. NM05_H27 OX=2516956 GN=E5332_04735 PE=4 SV=1
MGLGRCIALASMRDVEYEYGTGAGSQPYFEAAKPNALDPAIRRMGEFLDLAFSGVHSRAGHADEQPPVFFSFNRFDGTNPAPADDLMASFPQLRFMLPEIVLIENERGRFLQVNSLGPVYPGRVARFQRLVAAAPRRETAFVSVTVEPDSRATWQSEMDAALAAIAEGRVSKVVLSRRQRVVAARPFSSKDLLVNLIDGDARGTVLLYRYADVFFCGCTPELLVRKQGDQVESMCLAGTCPVGATPEESQVLAEELMADSKNRAEHDYVVQLIRNVLDRVCYAVDVPATPEIMRLAHVQHLFTPARARALAGVTLADLMEDLHPTPAVAGAPVGEARMLLREIEPYNRGFFAGACGFVDGEGDGEFSVALRTGVFDGEMGWVYGGCGIVAESDAEAEYHEIDLKLRTILSAFGKDAL

SEQ ID NO: 93853 - protein, 438 aa, Enterovibrio coralii
  misc_feature (1)..(438): tr|A0A135I8L4|A0A135I8L4_9GAMM Isochorismate synthase M enF OS=Enterovibrio coralii OX=294935 GN=menF PE=3 SV=1
MTDLSQAIARLIETLSTATPIKKRLSLPFTWPSDLDPIAWLDAQPIFPKFYWQTRDGDEEVIALGQVKTFADPCSAEKYLASDQRVWGGRSFDGRTERNQRCLQSFFFLPCIELSRRGEDWTVAINLNEEPLKAQAALSKVTHKPRTLSCPECNILASEHSPEFPEWSTMIDHALTTIEATDLQKVVLARKTSLTLDRPLSAAQLMKASRDQNVSNFHFLLALDEKHCFVGSTPERLFERQGQQMKTEALAGTIGRGNNAAHDDELAQWLLNDQKNVYENRLVVDDISARLATCTQSLDIEQTPHLVRLRKVQHLKRDIAGELKDGVPSSTLLEMLQPTAAIAGLPRQQAVDFIVENEPFARGWYSGSVGYLSAEQSEFCVAIRSALVMDDVLHLFAGAGIVPGSQPACEWKELDRKVSTLMSLLKPVPEKTAEKKAG

SEQ ID NO: 93854 - protein, 490 aa, Enterovibrio nigricans
  misc_feature (1)..(490): tr|A0A1T4USA0|A0A1T4USA0_9GAMM Isochorismate synthase M enF OS=Enterovibrio nigricans DSM 22720 OX=1121868 GN=m enF PE=3 SV=1
MQIPSKWLCFVRLVQSYSLCVTSVAVAGLSEAGISPRSREFCKLVVSFKRGYLTDLSQAIARFIETLSIAAPIEKRLSLPFTWPSALDPIAWLDAQPLFPKFYWQTRDGNEEVIAMGQVKTFSDPQVAENYLAPGQRVWGGRSFDGRTERNHRCLQSFFFLPCIEISRKGNDWSVAININEEPLRAQAALSKVTHIPQRLSEPECNILSSEHSPAFPEWSTMLDRALTTIEATELQKVVLARKTSLTLDRPLSAAQLMKASRDQNVSNFHFLLALDEKHCFVGSTPERLFERHDCEVKTEALAGTIGRGKDTQHDDELAQWLLNDQKNVYENRLVVDDITSRMQVCTENLEVEEAAHLVRLRKVQHLKRDISGVLHADVPSSTLLEILQPTAAIAGLPRQQAVDFIVDNEPFVRGWYSGSVGYLSAKKSEFCVAIRSALVMDNVLHLFAGAGIVPGSQPACEWKELDRKVSTLMSLLKPVPEKTAEKKYG

SEQ ID NO: 93855 - protein, 454 aa, Enterovibrio norvegicus
  misc_feature (1)..(454): tr|A0A4U1XPG4|A0A4U1XPG4_9GAMM Isochorismate synthase M enF OS=Enterovibrio norvegicus OX=188144 GN=menF PE=3 S V=1
MTELIQAIGRLCDALSTLSALPPRLSVDLTLSDHIDPIEWLDAQPLFPKFYWQSRDGAEETVALGQVRTFSNPYSAELVLEDGQRIWGGRSFDGRTERNQRCLQSFFFLPQIELSRVGETWYLSLNTGDDIGKARAALNKLSDSTSTLARPQCDILDAEHSPSYPQWSSMLEKALAEIDSTDLQKVVLARKTSLTLDRHISAAQLLKASREQNSANFHFLLALDEKHSFVGSTPERLFNRQGQALLTEALAGTIGRGKTAQDDKALAQWLLNDPKNIYENRLVVEDIESRLLPNSIALTVEGSPHLVQLRKVQHLKRNIEAELHNDVSSSDLLDMLQPTAAIAGLPRDNAVKFITENEPFARGWYSGAVGFLGRERSEFCVAIRSALVMNDTLHLFAGAGIVPGSEPETEWKELDRKMSTLMSLLSPVLDPLPFEKKRSMLPMSNAIDMEQKAG

SEQ ID NO: 93856 - protein, 430 aa, Erwinia billingiae
  misc_feature (1)..(430): tr|D8MUS7|D8MUS7_ERWBE Isochorismate synthase MenF OS=E rwinia billingiae (strain Eb661) OX=634500 GN=menF PE=3 SV=1
MSFASALNNLQQQLRAVTASQPGFLRLSATVTDPSDGLAWLDAQPVWPKFYWQHRGGEQTLMALGEVQRAETLQQASQLLRALPAEGCLVGSNEFALQHCCLFLPRVLLRGNTLSVFLHGVLREDAQAAIGLIVSLLPAHPFESLPQRLSACQHFPDSGGWQQQVAAALAAIRQGDLDKVVLARATDLHFTQAVNAAALLDASRQANRHCYHFMLAISPQQAFVGSSPEQLFHRHGLALNTEALAGTCANASDAHLAQQLGDALLNDEKNRRENGLVVEDICQRLESITSGLDVSPAHVVRLRKVQHLKREIQGQLYQQDDMALLQRLQPTAAVAGLPRQPAQQFIRQHEPFSRGWYAGSVGWLSAAESEFAVALRSAQVSGNSVRLYAGAGIVAGSEASLEWQEINQKAAGLASLLGVEIASGSCPKSK

SEQ ID NO: 93857 - protein, 390 aa, Erwinia gerundensis
  misc_feature (1)..(390): tr|A0A0U5GHY3|A0A0U5GHY3_9GAMM Isochorismate synthase E ntC OS=Erwinia gerundensis OX=1619313 GN=entC PE=4 SV=1
MVETSVFENAFVEDFDAVSRGFFYLSPWRSLWTQGCFSRLTTPVAGAEQPDGAFQCQLRQQFSEAKQQGIQNPIMVGAIPFDASQPSALFIPEASHFFDRQQLAGGFTDTPLPTVTSRTALPDHAAFTDMVAQAVNATSQGELDKVVLSRLMDITTERPVDTAMLMRRIINQNPTSYNFHVPLPDGGSLLGASPELLLRKQNGEFSSCPLAGSARRQQDRQQDNAVGQRLMHSSKDRHEHKLVTDAMRDVLQSRSSLLSVPETPQLVTTPTLWHLATWINGEARDPRDNALSLASLLHPTPALSGFPHARAQKLIAQLEPFDRHLFGGIVGWCNEAGDGEWVVTIRCGTVHNTRVRLFAGAGIVPDSSPESEWNETGVKLDTMLRAFGLQ

SEQ ID NO: 93858 - protein, 391 aa, Erwinia piriflorinigrans
  misc_feature (1)..(391): tr|V5Z366|V5Z366_9GAMM Isochorismate synthase OS=Erwini a piriflorinigrans CFBP 5888 OX=1161919 GN=cbsC PE=4 SV =1
MESLTSESTLEFATNAAASGFFFMSPWRSLAAQGCFTTITTPASGGNSLDGDFQQEVRQRFSEARRQGIVSPVLVGAIPFDVSQPSSLFIPESSHYFDGKAFRQQMSAHKAGLPEVIRRQAVPEQDEFMLMVSKAVAATGSRQLDKVVLSRLMEIVTAQPVESRDLMMRLIAQNPESYNFHISLPQGGSLLGASPELLLRQCEKRFYTHPLAGSARRERDAQKDSQAGQRLMNSGKDRYEHKLVTDAMRDVLHPRSASLKLPATPQLLTTSTLWHLGTAIEGEVSNKADTALSMACLLHPTPALSGFPHACAQKLIAELEPFKRGLFGGIVGWCDEHGNGEWVVTIRCGKVNGNRVQLFAGAGIVPASTPESEWRETGVKLNTMLSALGLN

SEQ ID NO: 93859 - protein, 393 aa, Erwinia psidii
  misc_feature (1)..(393): tr|A0A3N6UUE6|A0A3N6UUE6_9GAMM Isochorismate synthase O S=Erwinia psidii OX=69224 GN=EB241_20275 PE=4 SV=1
MTICNKVGAGCLPVSPGAESFLFTSCWKSLVTEGRLISVETPASQGDKLEGAFQQAVRSAFAAARATGMVRPLLVGAIPFDTRQPSALFIPRHSYFFNRRQWQPAGIPNGGQWPPEATEQRALPEKAAFMAMVAKAAQATARPGLDKVVLSRLIEITTAQPLHPAAVVHRLVALNPGCYHFYLPLADGSSLLGASPELLLRKSGHHFSSLPLAGSAPRDLTSLQQDHDIGARLMRSQKDRFEHQLVTQAMRQLLQPRSLSLDISQQPTLITTPTLWHLATQIEGEVRSEQENALSLACLLHPTPALSGHPHVAARQWITQLEPFDRQLFGGIVGWCDEAGNGEWVVTIRCATLAGNRIRLFAGAGIVPASEPEAEWNETGTKLSTMLKVFGLR

SEQ ID NO: 93860 - protein, 392 aa, Erwinia sp.
  misc_feature (1)..(392): tr|A0A427KAA8|A0A427KAA8_9GAMM Isochorismate synthase O S=Erwinia sp. 198 OX=2022746 GN=EGK14_05585 PE=4 SV=1
METLCADAVKPSVSLSSESFFFASPWKSFITTGRFAEITCPAADGDNLHGAFQQQVRSAFAAARAKGITRPVMVGAIPFDTRQPSALFIPERHEAFSRQQPLQAAQQAKSAVEPVITARRNIPEQAEFMEMVAKAAEATAQPGLDKVVLSRLIDITTAEPVQATALMDRLIALNPGSYHFHVPLADGSTLLGASPELLLRKSGETYTSLPLAGSARRDRSDKARDLAVGEKLMYSQKDRYEHRLVTSAMYDVLKPRSRSLAVPDKPEPITTSTLWHLATAIEGKAAAAEETALSLACLLHPTPALSGYPHVAACEWIEKLEPFNRELFGGIVGWCDDEGNGEWVVTIRCGTLAGKNIRLFAGAGIVPASSPESEWRETGVKLSTMLHVFGLQ

SEQ ID NO: 93861 - protein, 380 aa, Erwinia tracheiphila
  misc_feature (1)..(380): tr|A0A345CSK9|A0A345CSK9_9GAMM Isochorismate synthase O S=Erwinia tracheiphila OX=65700 GN=AV903_10795 PE=4 SV= 1
MFSTIPSGAESFLFTSCWKSLVAEGRFLSVTTPARDGEWFDGAFQQAAREAFATARASGITHPLLVGAIPFDTTQPSALFIPRHTHFLERRLLVTASGHLTLETTGQKAVPEKAIFTSMVVNALKAIETGSLNKVVLSRLIDITTARPLQPAALVNRLIALNPGCHHFYLPLSDGTTLIGASPELLLRKSGRHFASQPLAGSARRNLNSPQRDVEIGQKLMQSPKDRHEHQLVIQAMWQRLQPRSITIHLPSQPVPVTTAQLWHLATKIEGEVASEQENSLSLACLLHPTPALSGHPQVAARRLIAQLEPFDRQLFGGLVGWCDEEGNGEWAVCIRCATLAGQRIRLFAGAGIVSASSPQAEWNETEVKFSTMLKVFGLQ

SEQ ID NO: 93862 - protein, 430 aa, Erwinia typographi
  misc_feature (1)..(430): tr|A0A0A3Z2B9|A0A0A3Z2B9_9GAMM Isochorismate synthase M enF OS=Erwinia typographi OX=371042 GN=menF PE=3 SV=1
MPFSSALRQLQQQLRSVIGTHRGFLCLAVPLPDEPDGLAWLDAQPVWPKFYWQQREGKQRLMALGEVQRAETLRQAAELLDSLPAEGCLVGANEFSLRQSYLFLPRLIWHGNTLKVFLHGELQEEAQAALGLIERLRPAKPLPELPRQLLTLQHFPDGEGWRQQVEAALRAIQTGSLDKVVLARATDLRFSQAFSAASLLQASREVNHDCYHFLLSPDARQAFVGSSPERLFHRQGLAFSSEALAGTCASSSDPQRAQQLADALLKDEKNRRENRLVVEDICQRLRPIAREVDVCPAAVVRLRKVQHLRCDIQGLLHKRDDRLLIRRLQPTAAVAGLPRQQAQLFIQQHEPFSRGWYAGSVGWLSASESEFTVALRCGLVEEDSVRLYAGAGIVAGSEAPLEWQEINHKASGLATLLGVEIASESCPKSS

SEQ ID NO: 93863 - protein, 432 aa, Escherichia albertii
  misc_feature (1)..(432): tr|A0A1X3JYU0|A0A1X3JYU0_9ESCH Isochorismate synthase M enF OS=Escherichia albertii B156 OX=550693 GN=menF PE=3 SV=1
MQSLTTALENLLRHLSQTVPATPGIRVFDIPFPLNDAFDALSWLACQQTYPQFYWQQRNGDEEAAVLGALVSFHSLDEAQRFLRQYPEHTDLRIWGLNSFDPSQGNLLLPRLEWRRCAGKATLRLTLFSESSLQHDANQAKELITTLANIKPLPALHLTTTQENHWPDKAGWTRLVKLATETIAEGELDKVVLARATDLHFTSPVNAAAMMAASRRLNLNCYHFFMAFDGESAFLGSSPERLWRRRDAALRTEALAGTVANHPDDKQAQKLGDWLMADDKNQRENMLVVEDICQRLQADTQALDVLPPQVLRLRKVQHLRRCIWTSLNKADDVVCLHQLQPTAAVAGLPRDLARQFIAQHEPFTREWYAGSAGYLSTQQSEFCVSLRSAKISGNVVRLYAGAGIVRGSDPEQEWQEIDNKAAGLRTLLQIEQ

SEQ ID NO: 93864 - protein, 431 aa, Escherichia coli
  misc_feature (1)..(431): sp|P38051|MENF_ECOLI Isochorismate synthase MenF OS=Esc herichia coli (strain K12) OX=83333 GN=menF PE=1 SV=4
MQSLTTALENLLRHLSQEIPATPGIRVIDIPFPLKDAFDALSWLASQQTYPQFYWQQRNGDEEAVVLGAITRFTSLDQAQRFLRQHPEHADLRIWGLNAFDPSQGNLLLPRLEWRRCGGKATLRLTLFSESSLQHDAIQAKEFIATLVSIKPLPGLHLTTTREQHWPDKTGWTQLIELATKTIAEGELDKVVLARATDLHFASPVNAAAMMAASRRLNLNCYHFYMAFDGENAFLGSSPERLWRRRDKALRTEALAGTVANNPDDKQAQQLGEWLMADDKNQRENMLVVEDICQRLQADTQTLDVLPPQVLRLRKVQHLRRCIWTSLNKADDVICLHQLQPTAAVAGLPRDLARQFIARHEPFTREWYAGSAGYLSLQQSEFCVSLRSAKISGNVVRLYAGAGIVRGSDPEQEWQEIDNKAAGLRTLLQME

SEQ ID NO: 93865 - protein, 431 aa, Escherichia fergusonii
  misc_feature (1)..(431): tr|F0JWC4|F0JWC4_ESCFE Isochorismate synthase MenF OS=E scherichia fergusonii ECD227 OX=981367 GN=menF PE=3 SV= 1
MQSLTTALESLLRQLSQSFPVAPGIRIFDIPFPLKDAFDALSWLASQQTYPQFYWQQRNGDEEAAVLGAITHFTSLDQAQRFLHQHPEHADLRIWGLNAFDPSQGNLLLPRLEWQRCGGKATLRLTLFSESSLQHDAIKAKEFIATLVSIKPLPGLHLTTTREQHWPDKTGWTRLIELATQTIAEGELDKVVLARATDLHFASPVNAAAMMAASRRLNLNCYHFYMAFDSENAFLGSSPERLWRRRDKALRTEALAGTVANHPDDKQAQQLGEWLMADDKNQRENMLVVEDICQRLQADTQTLDVLPPQVLRLRKVQHLRRCIWTSLNKADDVICLHQLQPTAAVAGLPRDLARQFIARHEPFTREWYAGSAGYLSLQQSEFCVSLRSAKISGNVVRLYAGAGIVRGSDPEQEWQEIDNKAAGLRTLLQME

SEQ ID NO: 93866 - protein, 391 aa, Escherichia marmotae
  misc_feature (1)..(391): tr|A0A370V3R3|A0A370V3R3_9ESCH Isochorismate synthase E ntC OS=Escherichia marmotae OX=1499973 GN=entC PE=4 SV= 1
MDTSLAEEVQQTMATLAPNRFFFMSPYRSFTTSGCFARFDEPAVNGDSPDSPFQQRLTALFANAKSQGIKNPVMVGAIPFDPRQPSSLYIPESWQPFSRQEKQASARRFTRSQSLNVVERQAIPEQATFEQMVARAAALTATPQVDKVVLSRLIDITTDAAIDSGVLLERLIAQNPVSYNFHVPLADGGVLLGASPELLLRKDGERFSSIPLAGSARRQPDEVLDREAGNRLLASEKDRHEHELVTQAMKEVLRERSSELHVPSSPQLIATPTLWHLATPFEGKANSQENALTLACLLHPTPALSGFPHQAATQVIAELEPFDRELFGGIVGWCDSEGNGEWVVTIRCAKLRENQVRLFAGAGIVPASSPLGEWRETGVKLSTMLNVFGLH

SEQ ID NO: 93867 - protein, 431 aa, Escherichia sp.
  misc_feature (1)..(431): tr|A0A5F1HHQ9|A0A5F1HHQ9_9ESCH Isochorismate synthase M enF OS=Escherichia sp. E2562 OX=2041646 GN=menF PE=3 SV =1
MQSLTTALENLLRHLSQEFPATPGIRVFDVPFPLNDAFDALSWLASQKMYPQFYWQQRNGDEEAAVLGTIASFSSLAQAQRFLRQHPDHTDLRIWGLNAFDPSQGNLLLPRLEWRRCAGKATLRLTLFSENSLQQDAHQAKEYIAALANIKPLPALHLTIIQENHWPDKSAWTGLIKLATDTIAEGELDKVVLARATDLHFSDSVNAAAMMAASRRLNLNCYHFYMAFDGESAFLGSSPERLWRRRDKALRTEALAGTVANHPDDKQAQQLGEWLMADDKNQRENMLVVEDICQRLQSDTQALDVLPPQVLRLRKVQHLRRCIWTSLNTADDVVCLHQLQPTAAVAGLPRDLARQFIARHEPFTREWYAGSAGYLSLQQSEFCVSLRSAKISGNVVRLYAGAGIVRGSDPELEWQEIDNKAAGLRTLLQLE

SEQ ID NO: 93868 - protein, 340 aa, Estrella lausannensis
  misc_feature (1)..(340): tr|A0A0H5E4J4|A0A0H5E4J4_9BACT Putative menaquinone-spe cific isochorismate synthase OS=Estrella lausannensis O X=483423 GN=menF PE=4 SV=1
MLDKEGFGKCASLIECDDGFLIGTGKRQWRGEPNPFKPAFFFPPFFLNCEDPFCVHQETFFLDKCAFQAFLNSAQHREEERFVWSRPEKEPYQLQFNLLRKQIESGQLQKGVPYSRRQSIGTIDSGRIFSILRSAFEKRGRGLLYGFWNADDGMLGVTPEKLFVRKDGTIYVDAVAGTRPTPDFKEKESVEHTLVTQGIKEALTPYGEVAVGQTCPIPYGKLLHLYTPIEVKARAEAPFKELVEKLHPTPALGTYPQKEGAAWLMEADRLIPRRRFGAPAGCIIPERGEARCLVAIRSIQWNDGNIEMFAGGGVTDESEVEKEWDEIQSKFQSIEQMLSV

SEQ ID NO: 93869 - protein, 471 aa, Euhalothece natronophila
  misc_feature (1)..(471): tr|A0A5B8NK91|A0A5B8NK91_9CHRO Isochorismate synthase O S=Euhalothece natronophila Z-M001 OX=522448 GN=FRE64_02 680 PE=4 SV=1
MSVTPCYARRLADPDHLHHFLQDCHKKCQQRHQSFIISVTQPLSLVEPLAILQQLNFREERSFYWETQQPKSAIAAWGICQEKNITGTNRFQQTQDFIDNCKDKIIELKHSQLSEAGLKFLTNFSFFSTSSYQGHFPSVTIFIPRWQVSRADNTCFLTYNFLLSHNSNIATIESKLSNKIEEIEKVGNSIITFPFSLSSPFQKSELQDSSQFKSAVKLALKDIERQELTKIVLAHHLDVVSPVSFSPYLSLHYLRQRYPHCYIFSVSNGEGTTFLGATPERLFSLRKQHLISDAIAGSAPRGKTEKIDHQFAQNLLASEKERREHQAVSCYIIKQLEALGLTPQRSRRQLLKLSNIQHLWTLIESQVPNNINPIEILAKLHPTPAVAGVTTEVACEKIGQYETFDRALYAAPIGWLDTQGNAEFMVGIRSAMINKNQARLYAGAGIVAGSNPDKELAEIQLKLQTMLKALQ

SEQ ID NO: 93870 - protein, 404 aa, Euryarchaeota archaeon
  misc_feature (1)..(404): tr|A0A3M1TYQ6|A0A3M1TYQ6_9EURY Isochorismate synthase O S=Euryarchaeota archaeon OX=2026739 GN=D6732_26775 PE=4 SV=1
MIQAILKSPIYPKIIYIEEERIQIALGANERKYPRSLLMVNEFIEKLKKKYERPFQIFGVLPFDFSVEGTIWEGLPPSIMVLPQWQFEWDNGKVTIKWAENETEAHMMMDKLLRETVVEIGDSKSEEKLHFQDIPMEEDWKRLVTEAIEDIKANKYQKIVLARAKSSTIPKGKQIDLAKTFLSLHENYPKCLTFLISLDKEHTFFGSTPETLGKKEGEVFQTMALAGTVPVSEGEQQARNLLLGTKKLTDEHKIVVESIVEQLKKVSKQQTISQPEILRLKNVFHLHTPIRSILKSDIPWYELIKVLHPTPAVGGRPRDIAISKIRSMEKWSRGWYTGLLGWVDHQGDFDLRVALRCALINHDIIWVFAGAGIVDGSEPVSEWEETESKFQPVLNSLVLTEVEK

SEQ ID NO: 93871 - protein, 459 aa, Ewingella americana
  misc_feature (1)..(459): tr|A0A085G950|A0A085G950_9GAMM Isochorismate synthase M enF OS=Ewingella americana ATCC 33852 OX=910964 GN=menF PE=3 SV=1
MAVKQISAILDQLDTALLGTFPDAAGLRQFTYRLPEQPHGGMLEWLDAQPCYPKFYWQQRDDAEEVVLCGDAANFSDMPTAQRFLQQYSDFPELRVWGLNAFNDGMGGAQASHVLFLPRIEITRRDGQCNLRCQLYSPVSLREEADKMRAFLRTLVNSRPLPALKSQVVRYQHLPTQPQWARMIDAVLSGIKQHQFDKVVLARKTTLALSQPLNPASFLAASRAVNHHCYHFMLAFAPQQAFLGSSPERLFLREKRQLFTEALAGTVAAADDHQQARALGQWLLNDPKNQRENMLVVDDICQRLQGGARSLDVMPAEILRLRKVQHLRRSIQAVLAKADDADCLQRLQPTAAVAGLPRQAAREFIARHEPFDRQWYAGSAGYLSLTRSEFTVALRSAAVKGSQLELFAGAGIVAGSDAAQEWLEIENKAAGLRTLLDEGASSAESAEPQYPELPAVRAG

SEQ ID NO: 93872 - protein, 461 aa, Exiguobacterium aurantiacum
  misc_feature (1)..(461): tr|A0A377FW05|A0A377FW05_9BACL Isochorismate synthase d hbC OS=Exiguobacterium aurantiacum OX=33987 GN=dhbC PE= 4 SV=1
MPDTQTHIKQRIEQAHKRARAWQRPVLASYTWEIPSFDAFHIIQNTETSHYYFASPDRTLEMLGCADALVLSASGPERFQRLQYDWSLHRRDVDATIYAFSGFSFDTFVRPQKNMWEAFGEASLVVPKFLYRRLGDKHTLTVSTLVSAKRSVEQYLIQLADQLAQFNALHAPDTEKPTYSQVKDGVDHFKSSFQQAKQYINEEKVEKIVIAREEIYQMSDEAFPFAQTLRHLSDQQLGSYVFLYQPKREIGFFGATPERLLKKQGPYIETAAIAGTMKRPDTDSEAEIAKAQLLQDRKNLEEHQIVVKAIKNALNPYAATIKAPESPQVLETRSVYHLHTPIQATLDTNASILSIIESLHPTPALGGSPKRMSVRLLRDIERFDRGWYGSPFGWLNTDGEGEFVVAIRSALVHHQFVAMYAGCGIVQESELESELEETEMKLSPIKQALGFHPVAPGGNPS

SEQ ID NO: 93873 - protein, 461 aa, Exiguobacterium sp.
  misc_feature (1)..(461): tr|A0A4R0ZSI6|A0A4R0ZSI6_9BACL Isochorismate synthase O S=Exiguobacterium sp. IPBC4 OX=2510946 GN=EVJ17_11550 P E=4 SV=1
MPDTQTHIKQRIEQAHKRARAWQRPVLASYTWEIPSFDAFHIIQNTETSHYYFSTPDRSLEMLGCADALVLTASGPERFQRLQYDWSLHRRDVDAVIYAFSGFSFDTFIRPQKNMWEAFGEASLVVPKFLYRRSGDKHTLTVSTLVSAKRSVEQYLIQLADQLAQFNALHAPDEQAPTYSQVKDGVDHFKSSFQQAKLNISEERVEKIVIAREEIYQTSEEPFPFATTLRHLSEHQTGSYVFLYQPKREIGFFGATPERLVKKQGPYIETAAIAGTIKRPDTEIEADVAKQTLLHDAKNLDEHQIVVKDIKNALTPYAATIKAPETPRILENRSVFHLHTPIQATLDTNASLLSIIESLHPTPALGGSPKRTSVRLLREIERFDRGWYGSPFGWLNTEGEGEFVVSIRSALVHHQFVALYAGCGIVQESELEAELAETEIKLSPIKQALGLDKVSAGGNQA

SEQ ID NO: 93874 - protein, 463 aa, Falsibacillus pallidus
  misc_feature (1)..(463): tr|A0A370GL34|A0A370GL34_9BACI Isochorismate synthase M enF OS=Falsibacillus pallidus OX=493781 GN=menF PE=3 SV =1
MAIIQQSKINNAFMKAKQENRQVLFSSTIEVQNAVDPLTFFKNGKEKYRGERFFWKDSSNELILAGIGVEKSFQYNEVDHRFFEAESEWKRLIDDAVIDNPSDIPGTGPLLFGGYSFDPLSEKEEEWADYAASQFYLPRHMLTISQGKKYLTVNILCMPNNEEESAIQTDINDLLSMGEKVQGMKSGEEASIEEINKEAWIQAVEDVIEKLRAGELQKVVLARKIKAVFKETIKPPNVLEALLNEQPDSFTFAFESGESCFIGASPERLIRKNGSKVLSTCLAGSIRRGTADEEDNRLGLELLNDQKNLQEHAFVVRMIESVFAKYCKDVEIPEGPTLLKLRDIQHLYTPVVGTIDEETPLSALIQSLHPTPALGGEPREKAMEVIRQKEKMDRGLYAAPIGWFDYRGNGEFAVAIRSGLLKNNEAFLYAGCGVVADSDPLSEYTETRIKLKPMLRAVGGIES

SEQ ID NO: 93875 - protein, 445 aa, Falsibacillus sp.
  misc_feature (1)..(445): tr|A0A3L7K639|A0A3L7K639_9BACI Isochorismate synthase O S=Falsibacillus sp. GY 10110 OX=2478915 GN=D9X91_00120 PE=4 SV=1
MEILFSTTMEIQDADGPLAFFEYGNEKFNGERFLWKDSQNHAVLVGVGIEKSFSHERTDHNRFFEAETEWKRFIDRAVIENPFEVPGTGPLLFGGFSFDPMSEKETEWAAFADSLFYLPKFMLTISQGKSYLTVNVACDPNDDLGAVTEIENFQMGYMQFQQKRSIQSPIISDMEEINKEEWIAAVADVVRQLKQGDVDKVVLARKMKVHFDEPILTEMVLQNLWQQQPDSFIFALEALESCFIGASPERLIQKTNNTVFSTCLAGSIARGKETREDELLGKELLNDRKNLHEHQLVVKMIVEVLKKHCIDIQIPENPALLKLRDIQHLYTPVTGTVDGNLSITKLVEALHPTPALGGVPRQRAMHIIREKEQMDRGMYASPIGWMDYRDNGEFAVAIRSGLIKQDEAVLYAGCGVVADSDPQSEYIETKIKFRPMYRAIGGTEE

SEQ ID NO: 93876 - protein, 356 aa, Fermentimonas caenicola
  misc_feature (1)..(356): tr|A0A098C2M9|A0A098C2M9_9PORP Isochorismate synthase O S=Fermentimonas caenicola OX=1562970 GN=EWM46_02540 PE= 4 SV=1
MTLKNSYQKLDSLIENDACFAIYRLPNESSPKFVMQNNGEIKHFYDIEELEENRGFVIAPYKIKKETPVLIIRPDCTNLNDAVIPDRQNPGVGSERFKLDNINRNDYNRLFDLFYMPLKDGTLKKVVLSRSKSFARNRNFSPGASFYKAMEKYKNSYVFLFHTPISGTWLGSTPEILLSGRGNSWHTVALAGTQYQVKEKISWDDKNLREQHLVTSYLLNQLSSFNIKPEINGPYTTKAANLAHLKTDLDFTLPENVGLGKLIKSLHPTPAVSGLPKEEAFGYIDMYEGYDRRYYTGFIGMMNKSSDTNLYVNLRCMEIGKSLLTLFAGSGLVTSSNSRDEWKETEQKLKTMASIC

SEQ ID NO: 93877 - protein, 383 aa, Ferrimicrobium acidiphilum
  misc_feature (1)..(383): tr|A0A0D8FUA3|A0A0D8FUA3_9ACTN Salicylate biosynthesis isochorismate synthase OS=Ferrimicrobium acidiphilum DS M 19497 OX=1121877 GN=pchA PE=4 SV=1
MRFLAGLSMVGSFGAGLLYGFITSLEAHHIPFQLVEAAGSLYVGVGQPVLCASDPGISQPGPCFLSSGFLVSESFQVRSYPVVLVAGRDRLEVDVYEAHPRAASELGIFGLASDVRIVAGGALLQGDRVHDLEATSRRIQLAKLAIDQGQLTKLVVAGHATQEVTERFSIGGALSRLKKAHPASHLYCVDGFFGASPELVAAKSGNLLSLRPLAGTALRGGQVALLNSSKDLFEHRLMVEQLCDDLGGFVKELDRPARPVLFDAGRLIHLATPMRGRLLPGVTLADVVLAIAPTAAVSGVPRISAVEMLRELEIFRGKYAGIVGLTDPFGDGEVYLSIRGASVVDGRLDLVAGAGIVADSQVDSEVAEIEAKIDVVTRALSAR

SEQ ID NO: 93878 - protein, 436 aa, Ferrimonas balearica
  misc_feature (1)..(436): tr|E1SVA5|E1SVA5_FERBD Isochorismate synthase MenF OS=F errimonas balearica (strain DSM 9799 / CCM 4581 / PAT) OX=550540 GN=menF PE=3 SV=1
MAQLECQPPGHLCLQLSEPLDAPPLIAWLANQSELPRIYWRGRRDGEEIAAIGAALDLHFDTLPSAEELDRLYNKYLGAGQDTQLRLYGGHAFDTQQPAWPDFGQARFVLPRIEIRRHGEQAQLLLNLCGQERPWQQELERARTALDAIQSAAPLSPLGPAHVLARQDTPDQPRWRELVEQITDPAFLAATPKVVMARETRLTTSALPNHWTVLHAWQLLNPGSYQFGFQFTDSHSFISCTPERLFHRHGRELSTEALAGTTTRGFTEAEDEALANALLADGKNSNENLLVRQLIEQQLGPLSDYVGSEETPTILKLNHIQHLHRSIRAELKAGVNDLQLLGALHPTPAVGGLPRESAMSFIRQREGFARGWYAGACGYFGAHETEFAVAIRSARFESERVTLYAGAGIVAHSEADAEWQELNNKLTTVLGILNGL

SEQ ID NO: 93879 - protein, 452 aa, Ferrimonas marina
  misc_feature (1)..(452): tr|A0A1M5ZBA2|A0A1M5ZBA2_9GAMM Isochorismate synthase M enF OS=Ferrimonas marina OX=299255 GN=menF PE=3 SV=1
MTELSLTAAVERLRLRLDQLQLHRPAFRCLQLSEAVDAPPLIAWLAAQQQLPKVYWRGRRDGEEIAAIGAAQDLYLPQMPSTERLDRLYGDFLRADNHEDLRLYGGIAFDPKQPAWPEFGQARFVLPRIELRRQQQEAEIRLTLCGNAEDWEAELAQARQALDDLDRVAPLPPLGPAHVLQRADTPQWPRWQDLVQQVTHPSFAEDTPKVVLARESKLQTSALPNPWTVLHAWQLLNPGSYQYGFQFAPGHTFISCSPERLYHRLGRELSTEALAGTTTRGFSEAEDQALANALLNDGKNSHENQLVREHIEQQLTPLSEYVGVEESPTILKLNHIQHLHRGIRAELKAGVNDLQLLQALHPTPAVGGLPRDPAMSFIRQREGFERGWYAGACGYLGSHESEFSVAIRSARFAPDHVTLYAGAGIVSDSDAEAEWQELNNKLTTVLGILNGL

SEQ ID NO: 93880 - protein, 450 aa, Ferrimonas sediminum
  misc_feature (1)..(450): tr|A0A1G8XE98|A0A1G8XE98_9GAMM Isochorismate synthase M enF OS=Ferrimonas sediminum OX=718193 GN=menF PE=3 SV=1
MEKLSLPTAIGRMQTRLAQLAHVQPEHPIVQITESIDATLLLPWLAAQTQWPKIYWRERNQGEQVAALGQCQCVRIDEQPQQQLNQFYQTACSHNLSGVRWYGGVAFDTKQPEWSAFGQATFVLPRLEIRQTDQSTQLLLNLKGEAECWLDELSDANDCLRRLCRIQPLPPLAPGHILSRQDTPSEARWHELVAQVTEPEFNADTPKVVLARQSQLQLSHQPNPWTVLHAWQRLNPNSYQYGFQLTPTASFISCSPERLFLRRQQELSTEALAGTTVRGFTEQEDARLAQSLLDDSKNQNENQLVRVLIEKQLQPLCDYVGTEESPSILKLNHIQHLHRTIKAEVKTGVNDLQLLQALHPTPAVGGLPRENAMTFIRQREGFSRGWYAGACGYFNCLGSEFSVAIRSALFSDNQITLFAGAGIVADSDPSAEWQELENKLATIMGILNGL

SEQ ID NO: 93881 - protein, 450 aa, Ferrimonas sp.
  misc_feature (1)..(450): tr|A0A4U1BBG8|A0A4U1BBG8_9GAMM Isochorismate synthase M enF OS=Ferrimonas sp. IMCC35001 OX=2569538 GN=menF PE=3 SV=1
MDKPSISIAISRMQTRLAQLANRQPEGDKVQLSESIQPTLLLPWLAAQEMWPQIYWRESNQGEQVAALGACGQHRIDAHAPQKLSEFYERCCRNNHSGLRWYGGVAFDTRQPAWDIFGQAQFILPRLEIRQGEREAQLLLNLNGDPERWLQELTRAAAFLEQVRAIKPLPPLAPGHILSRQDTPSESHWHQLVTQVTEPEFNRDTPKVVLARQSQLQLSHQPHPWTVLHAWQLLNPNSYQYGFQLTPKDSFISCSPERLFQRSQQELTTEALAGTTVRGFTPEEDDALAQALLDDDKNQHENQLVRLQIEKQLQPLCDYVGTEESPSILKLNHIQHLHRTIKAEVKYGVNDLQLLQALHPTPAVGGYPRESAMTFIRQREGFSRGWYAGACGYFNCLGSEFSVALRSARFSGDTITLFAGAGIVAGSDPDAEWQELENKLATIMGILNGL

SEQ ID NO: 93882 - protein, 429 aa, Fibrella aestuarina
  misc_feature (1)..(429): tr|I0K5R0|I0K5R0_9BACT Isochorismate synthase OS=Fibrel la aestuarina BUZ 2 OX=1166018 GN=entC PE=4 SV=1
MIASSAKPTARQLAPSLSHIWQTALDTNQPAALWRLPNQTDKRLIVHLGDKLTEQPIDLDELRPGFAIGLFDNPTDPNREEMAKAFYLHADLQYTIDGNGQVEPKRDVPTASLNPLADAFQVRVRAAMQAGQEPRPSGAGSLSAIEFTETTQPDAQRNFEDAVAEAVRAMQAGKFWKVVISRTKTIEFAEQPDVTILFDRLCAAYPAAFVSAVWLPEGTGGAPAQIWLSATPERLVSVEADGVFRTVALAGTQSAYYPDGTLKRTADALWSQKEIEEQALVSRYIIGCFKKIRLREYVEEGPKTAQAGNLMHLCTQYTVDTNAVNFPQLGTVMLRLLHPTSAVCGMPRPEALHFIQTHERHDRRFYAGFAGPVNIDAASHLFVHIRCLKLEGKTATLYAGAGLTEDSDPQKEWLETEMKCQTLLRGMRG

SEQ ID NO: 93883 - protein, 425 aa, Fibrisoma sp.
  misc_feature (1)..(425): tr|A0A418MH67|A0A418MH67_9BACT Isochorismate synthase O S=Fibrisoma sp. HYT19 OX=2305895 GN=DYU11_00060 PE=4 SV =1
MQSDLSTITVTAPHTVAEPTATHFWESARQLGCPAALWRLPNQQDKHLIIHLTDVLPRVSADLEELPAGFAVSPFDNLDNGPDNPARTLFLRADVHVVFSEGTITHLNYAAGNKAEALRQSVAEQANRPRKPRPTRIAGKTIADGDAQQLYEQNVAEAVAEMQQEHFRKVVLSRTKRVEFDHTPDVVALFDKLCLAYPTAFVSAVFLPERGQVWISATPERLVSVDDKGVFRTVSLAGTQSAFDAAGQPKRPSEAMWSQKEIEEQALVSRYIIECFKKIRLREYLEEGPKTIVAGNLMHLGTRFTVDTQAVRYPQLGTVMLRLLHPTSAVCGMPRDVAYDFIRTHEPHDRELYSGFLGPVNVTTEHSGPESHLFVHIRCLKLEGNVATLYAGAGLTEDSVPEREWQETEMKCQTLLNVLATQKDS

SEQ ID NO: 93884 - protein, 461 aa, Filibacter sp.
  misc_feature (1)..(461): tr|A0A3P5X4Z1|A0A3P5X4Z1_9BACL Salicylate biosynthesis isochorismate synthase OS=Filibacter sp. TB-66 OX=24838 11 GN=pchA PE=4 SV=1
MNRKLTASHDNQVEINKSDLRFFTETIDAGRISPLAFFEAGNSCYIDERFYWQNADKTLTLVGLGHATILESESGKERFEHISKEWDILRAALIKEEKDMEPVLFGGFSFDPQSRKDSEWDAFPSAHFVVPSFQLTIKNGNTTIAINLITKNGGAVDEFEKLREERDRLIHIAQVDEFELLAKPEVVSIEERKKEQYLDAVQHVTEKIKDGDAKKVVIARSIKLNFEEEVPTVTALHHISNEQQESYHFGLEKNGQLFFGATPERLIEISNGRAYSSCVAGSIKRGKSAMDDRKLGKELMDDRKNREEHQYVVNMISQVFSKFCTDISIPKKPKLMKIRDIQHLFTPLEGNVEQKTDIFSLVEALHPTPALGGVPTDVSMDMIREQEQMDRGYYAAPIGWTDTAGNGEFAVAIRSALLKGSHAYLYAGGGIVADSEPEKEYDETWVKFRPVMRALGGKMNG

SEQ ID NO: 93885 - protein, 461 aa, Filobacillus milosensis
  misc_feature (1)..(461): tr|A0A4Y8IJN3|A0A4Y8IJN3_9BACI Isochorismate synthase M enF OS=Filobacillus milosensis OX=94137 GN=menF PE=3 SV =1
MLKTKQLTINEQLNKVKDQLSDGEQKNVSVIEEINEINPVDFFAAFEATDMHRVFWKDVTENIYFVGIGAHEKFQTNTQDRFQSMKEQWDKYVQNVQVAIDAVKGTGPILLGGFSFNQNISSEKWKKFRPGMMVLPEMMLTVNEEGCYMTYNLSITSSTNVSRTVRELKRWKHQISGLNDNQDSQTVKSTKSLDYRNWNQLILDAVETIKSGKLGKVVLARELEAEFNQDINLKEVLKRLDEDETDSYIYIFDLGQDSFISVTPERLVSVRENELLSTCLAGTISRGETEEEDDVLAWSLLNDEKNLSEHQYVVNMIKEAIEPLTKSISIPDKPVIYPLRSLQHLYTPVKATMKETISIFDLIEKLHPTPALGGEPRELAMEFISSHEPFERGWYAAPIGWVDYQGNGEFAVAIRSALISKNEATLFAGCGIVEESDPEAEYEETKLKFTPMLEALGGVSR

SEQ ID NO: 93886 - protein, 504 aa, Firmicutes bacterium
  misc_feature (1)..(504): tr|A0A418MLY2|A0A418MLY2_9FIRM Isochorismate synthase O S=Firmicutes bacterium I2511 OX=2048547 GN=D2Q93_01230 PE=4 SV=1
MAALNSTFPGLRTQWPEGVELRPWLLEVANLAAQQAAKLQQRVTGSVTLSLPAWPEDLLDRLIRSTSGLETGTHQGFYGVYPVRGLRLVTWGCVDQLTATGTQRVKDLADLLRDASAAQVWLHQPPQWFGGFSFAPGPRLGPWQNWPDAILTLPQLSWVDTPQGVWLTVNLALTPGQSPQEAVANTVAAYQSLRQISAVAGLNRLNHTAQVVAGRTQTNGPFPPWSDELEHQTFVSGVEQCVADIRMGQYEKVVLARREQIVGDAREGLQKAAKTLEQAYPNSFTYLLRQANSWFIGASPEQLVRVVDGELLADCLAGTAPRGKDEVADEQLGQGLLNSVKNRHEHAIVRTWICSQLKDLTSEVQAPEIPQLRKLTNVQHLHTPIRARLRASVGALDVAARLHPTPAVAGVPQTAAMAAVLRQEPFDRGWYAGGVGWVDVRGNGEFFVALRSALLESSTAWLYAGAGIVDASDGEEEWAETELKLTPMRTALAWHKEDADSAGK

SEQ ID NO: 93887 - protein, 471 aa, Fischerella thermalis
  misc_feature (1)..(471): tr|G6FY06|G6FY06_9CYAN Isochorismate synthase OS=Fische rella thermalis OX=372787 GN=FJSC11DRAFT_3755 PE=4 SV=1
MTVSPCAADFCVYNRELYQFLVAAQRKSIKNNSTQIASISLEINLVDPLVVLNKLAQPHQLNFYWENQSKKEAIAAIGAVAKLQLQGKERFSKSEGFIKYCLKNIINFATTERTFSKPLFFCGFSFFDINKQENYPFPAATVFLPRWQIAVKEECCILVANFSIHADVNIEKILQILWRKIEIIHSWEFYSPHQNFQEPKFSKKSVANPEKFKSSVLSALETIRSTHVSKIVLADALDVRSNTPFDLFNSLHNLRQLHPNCYIFSTSNGKGQNFIGASPERLICIHNQQLITDALAGSAARGKTPAEDATNADRLLNSEKERHEHSLVIDFITQRLSQLGLLPQILPPRLRQLSNIQHLWTPISAIVPDEVHPLKIVSQLHPTPAVAGTAPDAACVEIRRYESFERGLYAAPLGWVDADGNCEFIVGIRSALIDGDRARLYAGAGIVAGSDPEKELAEIQLKLQALLKALV

SEQ ID NO: 93888 - protein, 2017 aa, Unknown
  misc_feature (1)..(2017): tr|A0A1Z5JQW7|A0A1Z5JQW7_FISSO Isochorismate synthase / 2-succinyl-5-enolpyruvyl-6-hydroxy-3-cyclohexene-1-car boxylate synthase / 2-succinyl-6-hydroxy-2,4-cyclohexad iene-1-carboxylate synthase / O-succinylbenzoate
MQRALDVLSSSSNSENDTLYRLEMTFSRRLQLLPWLKHQLKYDPEQHFFYLQTATDDAEEIVAWGIQQAVDHTSALWDDHRQLPLHARWYGAQTFDGNMAQWVLPMLEWRQNVTHTVLALHTTGTREEAARIAQSINTRHLDDEWTIPTPLPPVVSKTDLAIDAYEQGVEEAIALMQQEKQNGEYSDLQKVVLARQQLLQFKHPFHVVDLLQRWKQESGTGNLFAMALWDEKDDNTIITSTRSSSCFVGCTPEQLFRIHNSTVTTEALAGTRPRGSHPQEDADLLQELVNSPKDLDENACTARYIEEVLSKQEPSIGPFVTSQTFVRRTRHLQHICRTYQAPVWNNTSTLIRNLLEQLHPTPAVCGLPLNMASDYIRRVEPFSRDYYAGPIGYLSSTESQLLVGIRSAVLRPKQELLLTAGSGLVLNSTLREEFAETVAKFQVVASWFSSPLSLQSCPNINTAWATAVVEEFVRCGVDMVFVCPGSRSTPLAVAWAWARRQHPFLRVISCHDERAAAFRAVGYGKASGRPAVVVTSSGTAVANLLPAVLEAHQDDAPMILLTADRPSEHRDISANQAMDQVKLFGDKVAWFRDILPPSDEVNVVAALSDANFAHNMALEQQQPVHINVQFRENLAPEGGPVRGGDGDAVESYNATRFTQGPAFARWSGSGQPLIQRHSSSTQNNDVAAANLVQWLRNSRRGLLVVGQIPPSQQDEVYPLLDQLAQTIGFPILATSSSLRFTSHAVVWFAEHLLSCPNVREAVQPDFILQVGAPLLSTTITSYLKQTAQHVILQTNARRRIDPEYSVTHSISTPNMAYFLESLILRTSELPKGSISSALTPLVPWSRTLAPVMKELLLQQSPDRLTEPQIILALAQKSLPQALFLSNSMPIRDAESFLYPYGEIKRTVPLTVTGSNRGVSGIDGIIATAQGFALNAAEPTQLIIGDVSALHDLNSFAFSSARKLSTLIVNNNGGAIFSFLPVAQHDVSFEEFFSTPTQHVDWEATARGLSVQYKKVATYEALMNQWEQQSVNTLVEAVVISREENVQLHRDLTKKIQSHVSEHFWLDSTTRPKVLPLKRYTSNNANRTLLLLHGWMGCKEDWDDVVEELLVHVGDDWNIVSIDLPGHNHLVPSIESISSTTSGLNYSVSAMAEWIGDCLAQHYQLREVNAVAGYSLGGRIGLELSRLYSIPQVTTISSSLEPIPVDDSGRAQRDDKLSQQLQNIFQQQLVAANPTTMWGEFLESWYSAPIWGHLKERRPDTYRAILERRTAILQRAGASIAQVLSEASPGRPENRRCEQDYFDRRHSLLIGELDSKYSLQSNATLISESGHALLWESPKTIALHLAEFLSCNGTSKNGDASRNNATVFVGNNRSSTAETLDVTIATTSSGNEKSKESSILKDGQREGLLIVESLDYQVFSIQLLKDRNQGLGWGASAAASSTMQNRTGMIIELRAFNYVGLGEVSPLKGVHDESLEQAQVQIQILQERLKLDSPSISLIENIDALLDAWEQLLNETWYTSVRFGLEMALRSLLWHANGMLPSSRGLLPLNGLQSRNSLIPQTQKWPSLKVKVGHDSIERDQAAIYQGFRSTLGKIRADANRAWDEEGALEFAFALEGWELQALNRLEYIEEPLQKVNEAAWSLEQQIEALERFYLQASIPYALDESIGDLVQAHRRNWERIRENLRKSFSGGRSSRGCACFVLKPAVLGFALTTRIAKLAREELQIPVVISSCMESGLGLAHAAFLAGEVDALPCNTPTLAHGLSTYSILSADLLSPSFASYVNAKGFLNVQSLGRALYGLNLDEVRTMLPDFCESSMQPHQEEDKYCAGTSFNRNEEISIVASLHLPFSAETAHARFTDLPQQPRWSPWITSVEYQGEISEWRMNVRGMSISWRARSEVRRAPHLGIQWESVDGLRNRGSVEFVPDSANSGNCQMQVRITLVPPALLKPLFHGAWIFLEDYLRDKLVQWSLEMFRDVVKADLALERGDLELGDALFNAVEGKATAIEATLNIEKSFE

SEQ ID NO: 93889 - protein, 353 aa, Flagellimonas maritima
  misc_feature (1)..(353): tr|A0A2Z4LW11|A0A2Z4LW11_9FLAO Isochorismate synthase O S=Flagellimonas maritima OX=1383885 GN=entC PE=4 SV=1
MPYQKNKNFYRLLQKVDACLKTGMPFSIYRKPLENKVKGVFQSGDKLKTAINFEEKGFVFAPFDDNGAIVLIKADELAEVDFLPETKNIYTEVELKDSGKDFHIELIKKGLNEIKEGSLKKVVLSRKISRPVSSSPSLIFKNLLERYQNAFCYLFFHPQIGVWCGATPETLVQIKDRQLRTMALAATLPIKESSSPGWGSKEFEEQAMVTRYIKETLGSSLESIDIGELESVKAGKLWHLKSTISGILSEKTSIKQVIDSLHPTPAVCGIPSKEAKSFIKNNEGYERTFYTGFLGELDLEKKRNIDLFVNLRCMKICDGMASIFVGGGITSASEPESEWTETQNKSKTMLSII

SEQ ID NO: 93890 - protein, 403 aa, Flammeovirga kamogawensis
  misc_feature (1)..(403): tr|A0A553GGK9|A0A553GGK9_9BACT Isochorismate synthase O S=Flammeovirga kamogawensis OX=373891 GN=EO216_11100 PE =4 SV=1
MEKKSQNIISTKVENSTLDFDTVLAVALNSGQPFAAWKMPNENTQSIVVSLQKEALRVTSDLENLPNGFLARPFQDQDNKAFLIPADIYYTSDLPEIQFSSDYDFDTKVKVEKALNDFKHNKPLKKWKDNMLKEHFPPTSKEHFTSIVDDSIEAMKDDAFLKVVLSRTKEVPLKDDFSPIHFFHRLCKAYPNAFISVCFIPKVGLWMGASPETLISVDENGVFRTVALAGTQASNGMLPKDASWKSKEIEEQALVSRYIINCFKKIRLREFDEKGPRTVAAAHLLHLRTDFKVDTKATNFPQLGTVMLDLLHPTSAVCGMPKEVATQFILDNEHYNRSLYSGYIGPIGLKNRNHLFVNLRCLQIFNDHALLYAGAGITEDSDAEKEWKETEIKMDTMLKHLHS

SEQ ID NO: 93891 - protein, 335 aa, Flavobacteria bacterium
  misc_feature (1)..(335): tr|Q26CK2|Q26CK2_FLABB Isochorismate synthase OS=Flavob acteria bacterium (strain BBFL7) OX=156586 GN=BBFL7_004 67 PE=4 SV=1
MADSNEVKIVAQNDQTWHKTAPDKVAYAVFSKFQSNENQVYITADKTLNFRYSAPTSQPKINQSKIPEDGKKDYLELFEKAMSRLEKQQLSKVVLSRKQEFPLQDSDLEIFERLLDNYTTANGYFFYHPQVGKWLGATPELLMDAQSDGLYTAQSRTDAIPLRVSTMSLAGTAVDDGSLNHVWGDKEKEEQQLVTDFIISQFKESGAIDMKQSPVETVQAGHLIHLRTFIQARSSTNQIERLLGALHPTPAVCGLPRDESMEFIVNNENYDRSYYTGYLGIVNGASHHYFVNLRCMQLVDTKAIIYVGGGVTAKSDALLEYQETRAKMQTMHRLL

SEQ ID NO: 93892 - protein, 338 aa, Flavobacteriaceae bacterium
  misc_feature (1)..(338): tr|A0A3L9M4S8|A0A3L9M4S8_9FLAO Isochorismate synthase O S=Flavobacteriaceae bacterium YIM 102668 OX=2479857 GN= EAH69_10970 PE=4 SV=1
MQNKFQEKFQEVIANQQSFLLFRQPNSSEVELWLDEEKNDENQFVFHRFDDSEHIIFSTDKVERIAINELVNIESFSLEQSSKKEAISYENYLELISKTVEELNTTSTEKIVISRIKEIENEGVNLIKTFKNLHQNYPKAFVYLWFTKENGLWIGASPELLLEEENLTVKTVSLAGTLPKEEEWTSKEIHEQQVVTDYIVSNLQDAKSISVNGPHTVDAGFFNHLKSYISAEVDDYEQVNKILNRLHPTPAVCGMPKQEAKNFILANEGYDRKYYAGYFGFKMPEKSLYFVNLRCAQIFSDVVKLYVGGGIMPDSNSEKEWQETELKSKTIGNLLVTD

SEQ ID NO: 93893 - protein, 355 aa, Flavobacteriales bacterium
  misc_feature (1)..(355): tr|A0A520U792|A0A520U792_9FLAO Isochorismate synthase O S=Flavobacteriales bacterium OX=2021391 GN=EVA43_04385 PE=4 SV=1
MDNLNVLKKIEQQYENNLPFVLYSYPKKESVNFILQKDNLVYDTGSSFKKYFLFSPFNDKNKNICIPLEKSNYFQTIYLKNNFEANEIKASEHVNDKNGYLKLVEDTIQEIKSNKATKIVVSRKKIVKLKKFDLLKLIERVLNLYPKAFRYVWYHPITGLWCGASPEVLLRTDGDFFKTMALAGTQKHIDNKIIKWNLKEKKEQQVVVDSLLKRLKKITSIVNISDTYNHKAGSLIHLRTDITGTIKRGKIGLKTLMSILHPTPAVCGSPKNYAKTFILENENYEREFYTGYLGSVNEPTNESILFVNLRCMKIENNTVNLYVGCGITKDSNPLKEWEETSHKSQTMLQVISSML

SEQ ID NO: 93894 - protein, 356 aa, Flavobacterium arcticum
  misc_feature (1)..(356): tr|A0A345HEM1|A0A345HEM1_9FLAO Isochorismate synthase O S=Flavobacterium arcticum OX=1784713 GN=DVK85_12655 PE= 4 SV=1
MTDTDIFLKIKSHLKEKKPFVVYCKPGLDSVTGIFQKEATQYYLDTFTDVGFVFAPFSGDKKVFIPAKVSDVFTAKISIENLVATKVDEAPAINEEAKANFENLVSKSIKAIKTGVFNKLVTSRTEIVSESEIDIIEVYQRLLHTYPNAFRYCIYTPDTGLWTGATPEQLLKVDNKTLNTVALAGTQLYIEGEEVVWENKEKEEQQIVTDYIMSSLQEYSDTITTTPPYTFRAGNIVHIKTDVTAELKNNNALEDVINKLHPTPAVCGMPKAEAMQFILENEGYNREYYSGYLGEMHHDFTAGSNNHTNLFVNLRCMKVVDNEAHLYIGCGITKDSNPEKEFFETVNKSMTMRKVI

SEQ ID NO: 93895 - protein, 353 aa, Flavobacterium branchiophilum
  misc_feature (1)..(353): tr|G2Z781|G2Z781_FLABF Isochorismate synthase OS=Flavob acterium branchiophilum (strain FL-15) OX=1034807 GN=me nF PE=4 SV=1
MDHLLQNAAIQFKNKRPFVLYKKPFSNQMVGMFQQDTTCYTTSEFTEQGFVFCSFDGSNAILIPKNKSKLFVETISTVDQKKTNNPLVEASYTDKSDYIQKIEHAIARIHQHEFTKIVLSRKAVFKLNTYDIFDLYSKMIDLYPEAFAYCWFHPQVGLWMGAFSERLLKIENQQFETMSVAGTQKNNPPYPIVWHEKEKDEQQIVTNYIIENLKNEVNTIEVQNPITLKAGNLLHLKTTISGTIKNESALHHWINILHPTPAVCGFPKEQAKKYVSLHENYNRAFYSGFLGEINFNSINNQQDTDLFVNLRCMQLQDNQAILYVGGGITKDSNPEKEWEETQNKLETMKRIFI

SEQ ID NO: 93896 - protein, 354 aa, Flavobacterium circumlabens
  misc_feature (1)..(354): tr|A0A4Y7UCJ3|A0A4Y7UCJ3_9FLAO Isochorismate synthase O S=Flavobacterium circumlabens OX=2133765 GN=D0809_10455 PE=4 SV=1
MNNFFSKIKLHKEQNLPFVLYSKPNSTKMIGLLQQNNVLYTVSDFTEKGFVFASFDEKQLILIPENESEIITSEQENIEFSLIERSDSGFDPVAKKQYEDLVAKGIQAIKNEEFKKVVLSRSESVVVTDFDFITTFQQLIQLYPTTFSYCFFHPEIGFWMGATPEQLLKANGNVFETTALAGTQKAESEVEISWQQKEKDEQQYVTDFIVKRLREVALSVQVTEPYSIKAGSIWHIKTDISGVLNENSTLEEVIDTLHPTPAVCGLPKKKAKAFIIANENYDRTFYTGFLGELNSSLASNAVSSDLFVNLRSMQIMENKAILYMGCGITKESIPEKEWEESVNKSMTMKRVLGK

SEQ ID NO: 93897 - protein, 342 aa, Flavobacterium columnare
  misc_feature (1)..(342): tr|A0A120HKV2|A0A120HKV2_9FLAO Isochorismate synthase O S=Flavobacterium columnare OX=996 GN=AWN65_05445 PE=4 S V=1
MNLPFVLYRKPNTKTLVGIFQENDHIYFTENFKEEAFIFAPFTGVPIIFPLEKSELKYNSVYFDHEIKDLEIDILENLLDKQNFIELVKKGISIIETGDFDKVVLSRTEEVLIKGFDMFRSFEQMLFKYPSAFCYTWYHPKIGLWMGATPEKLFSIKENNFETMALAGTQIAQNEERVLWTKKEKKEQQFVTDFIKDQLKGIIYDLQISDAYTSKAGKLFHLRTDIKGIVKDATILEEIINVLHPTPAVCGVPKMITKNFIEKEEGYHREFYTGFLGELNIDCNTNEKSTDLYVNLRCMKVLENKINLFIGCGITRDSNPESEWYETLNKSKTMRIIINNSK

SEQ ID NO: 93898 - protein, 354 aa, Flavobacterium cupreum
  misc_feature (1)..(354): tr|A0A434A6B5|A0A434A6B5_9FLAO Isochorismate synthase O S=Flavobacterium cupreum OX=2133766 GN=D0817_12090 PE=4 SV=1
MNNFFSKIKLHKEQNLPFVLYSKPNSTKMIGLLQKNNILYTVSDFTEKGFVFASFDEKQLILIPENESEIITAEQENIEFSPVETHDLSFDPAAKKQYEDLVAKGIEAIKNEEFKKVVLSRSESVAVSDFDFITTFRQLIQLYPTTFSYCFFHPEIGFWMGATPEQLLKANGNVFETTALAGTQKANVEAEISWQQKEKDEQQYVTDFIVKRLREVALSVHVTEPYSIKAGSIWHIKTDISGVLNDNSTLEEVIDTLHPTPAVCGLPKKKAKAFIIENEHYERTFYTGFLGELNSSLASNAVSSDLFVNLRSMQLQDHKAILYMGCGITKESIPEKEWEESVNKSMTMKRVLRK

SEQ ID NO: 93899 - protein, 353 aa, Flavobacterium frigoris
  misc_feature (1)..(353): tr|H7FU55|H7FU55_FLAFP Isochorismate synthase OS=Flavob acterium frigoris (strain PS1) OX=1086011 GN=HJ01_02775 PE=4 SV=1
MIDFFIKVKQQESQNLPFVIYRKPNKTKLIGLFQKNDHLYFAEDFKETGFVFAPFNGSQIILIPKKESILWESELTAFKADYDSENKYPVNNQDKERFESLVQKGVDATTRGVFKKVVLSRKEIIDLPNFDLVSVFKKLIYTYPDAFCYCWYHPKIGLWIGATPERLLKASRKKFFTMALAGTQNYEDTIDVVWEKKEMEEQQFVTDFILDNIKLLTREVAVSSPYTLKAGGILHIKTDIEGKLNKDSNMKQVVSVLHPTPAVCGLPKESARNFILENEKYDREYYTGFLGEINKKEFSKDTSKTDLYVNLRCMQITNKEAHLYVGCGITKDSIPENEWKESVNKSMTMKRVL

SEQ ID NO: 93900 - protein, 342 aa, Flavobacterium indicum
  misc_feature (1)..(342): tr|H8XUX7|H8XUX7_FLAIG Isochorismate synthase OS=Flavob acterium indicum (strain DSM 17447 / CIP 109464 / GPTSA 100-9) OX=1094466 GN=menF PE=4 SV=1
MLLLEKASHYFSKKLPFALFVKPNQVQLNGVFQNTDELVEFSGQKGFVFSGFYNTKDVVLPFDSCEVIQENWSYEKHYQERIYFSDSEGVEFKNLVQKGINAIVENQFEKVVLSRKIEIPNDTINSIESFKNLVNTYSTAFRYLFYHPQIGLWMGATPEQLVKIKNGEFYTMALAGTQPYSEHIVWGEKEIKEQELVTDFIKNQIEDKVDTIKISDAITHRAGSIVHLKTDISGSIKSSIQPLVLVKALHPTSAVCGMPLQQARSFILEHEGYDRKYYSGYLGEWKGMENSDLFVNLRCCEFLENAVAVYVGCGITKDSIPEHEFIETFNKSRTIVSILVRG

SEQ ID NO: 93901 - protein, 352 aa, Flavobacterium johnsoniae
  misc_feature (1)..(352): tr|A0A525HCQ6|A0A525HCQ6_FLAJO Isochorismate synthase O S=Flavobacterium johnsoniae OX=986 GN=DI588_00655 PE=4 SV=1
MSGLYQKAEEQFKKRLPFVLYSKPGETVAVGIFQKDASLHFTTDFKEEGFVLAPFHGEQFVLLPKEKSDVFTEAYTRIAIENNNTVFGADVAAKENFEQLVQNGVDAICKGDFKKVVLSRKETVSLENATPFELFKKLLSAYPTAFKYCFFHPEIGMWLGATPEQLLKASGDRIKTVALAGTQVYHEGEIKWEIKEQEEQEFVTEFILEGLEDCTAEKNSSKPYTFRAGNIVHIKTDIEARLHDRQDLGKIIKMLHPTPAVCGLPKEASKKFILENEGYDREYYSGFLGELNRDFAKDKPENSDLFVNLRCMKLQNGKANLYIGCGITKDSIPEKEFIETVNKSLTLKNILG

SEQ ID NO: 93902 - protein, 353 aa, Flavobacterium macacae
  misc_feature (1)..(353): tr|A0A3P3W408|A0A3P3W408_9FLAO Isochorismate synthase O S=Flavobacterium macacae OX=2488993 GN=EG849_12740 PE=4 SV=1
MSELLKKGTSYLKEEMPFVIYSKPNEAEIIGIFQKDNSLNHTENFTETGFVFAPFDGEKFVLIPENDSDILVEAISEITILNSLNSASEINSEVKENFENLVQKGIDAIHSGTFQKVVLSRTEAVSLENADVIFLFQKLVATYKTAFKYCFFHPKIGLWLGATPEQLLKVNSNEIKTVALAGTQVFHEGEIIWENKEKEEQQFVTDFISQNLDEFVSEKHTSDPYTYRAGNIVHIKTDISATLKDKKDVKKVLKILHPTPAVCGLPKLKAKEFIIKEEGYNREYYSGFLGELNKDLAKNEFEKSDLFVNLRCMKIEDKTASLFIGCGITKDSDPEKEFFETVNKSLTMKKILF

SEQ ID NO: 93903 - protein, 361 aa, Flavobacterium pectinovorum
  misc_feature (1)..(361): tr|A0A502E8W9|A0A502E8W9_9FLAO Isochorismate synthase O S=Flavobacterium pectinovorum OX=29533 GN=EAH81_24770 P E=4 SV=1
MNDFFSTIRKHQAQNLPFVIYSKPNSSSIFALLQQNDTLYTVSDYSEKGFVFASFDEKQLILIPEEESKIISAEQTKVDFDFNETEDLTFDLEAKTQYEDLVSKGIEAIKNDEFKKVVLSRSEKIDFADFDFVITFKRLIHLYPTTFSYCFFHPQIGLWMGATPEQLLKASGNVFETTALAGTQKATLETEISWQQKEKDEQQYVTDFIVKRLREVASSVVVTEPYSIKAGSIWHIKTDISGVLNDNSTLEEVIDTLHPTPAVCGLPKKKAKAFIIENENYDRTFYTGFLGELNSSFANKTVSSDLFVNLRSMQIHDGKAILYMGCGITKESIPEKEWEESVNKSMTMKRVLNIKKNNSSC

SEQ ID NO: 93904 - protein, 353 aa, Flavobacterium psychrophilum
  misc_feature (1)..(353): tr|A0A238NST2|A0A238NST2_FLAPS Isochorismate synthase O S=Flavobacterium psychrophilum OX=96345 GN=menF PE=4 SV =1
MNIIFNKGKDFLSKKIPFVIYCKPNSNKLVGVFQKNDNLFEIENFEEIGFAFVSFDGKKKYLIPKNESDIYIETITKIDHCTENNININIDANAKITFENLVKKGINAIQNKQFDKVVLSRKETLKINVFDFQNVFNKFLFNYQNTFKYCFYHPKIGFWMGATPEQFLQSYQNTIKTVSFAGTQPYCEKEKYIWEEKEKQEQQFVTDFILDNLKKHSTQILFSEPYTFRAGSVVHLKTDIEAIINTQNNFSNIIKNLHPTPAVCGLPKDRAMQFIINNEAYDRTYYTGFLGELNIDFETLKNKKSDLFVNLRCMNIEDNLANIYIGCGITKDSIAENEFTETVNKSKTMTKVL

SEQ ID NO: 93905 - protein, 354 aa, Flavobacterium sp.
  misc_feature (1)..(354): tr|A0A553AEY1|A0A553AEY1_9FLAO Isochorismate synthase O S=Flavobacterium sp. GT3R68 OX=2594437 GN=FNW07_09790 P E=4 SV=1
MIDFFIKVKQQEAQHLPFVIYSKPNKNKLVGYFQKNDHLYFAEDFNETGFIFAPFDGSQIILIPKRQSVKWESHFLSFEENHHSNFVSAENEQDKAHFETLVQKGIDAINNGFFNKVVLSREEIIDVPDFDVVGVFEKLVRTYPSAFTYCWYHPKIGLWMGATPERLLKSKKNKFYTMALAGTQSFNGSSKVSWENKEKEEQQLVTDFILDNLKNVTSEVAVSSPYTLKAGNILHIKTDIEGIINEDSTLEQVVSILHPTPAVCGLPKSIAKDFILKNEEYDRQYYTGFLGELNFKSSNFEKAKSDLFVNLRCLQIKDKQAHLYVGCGITKDSIPEKEWIETVNKSLTMKKIIV

SEQ ID NO: 93906 - protein, 366 aa, Flavobacterium succinicans
  misc_feature (1)..(366): tr|A0A199XSR1|A0A199XSR1_9FLAO Salicylate biosynthesis isochorismate synthase OS=Flavobacterium succinicans OX =29536 GN=pchA PE=4 SV=1
MIDFFIKVQQQIALNLPFVIYHKPNKSKLIGFFQKNDHLFFVDDFKESGFVFSPFNGNQMILIPLKESVKWETIVPTVEFEETKVTSSDENQEAKNHFLALIEKGVETIKKGVFDKVVLSRQEEVNVSNFDVVTTFEKLIALYPTAFTYCWFHPKIGLWMGATPERLLKANKSKFYTTALAGTQIFDPKKRTAVWGNKEQKEQQYVTDSILDSLKNHTAEIVLSSPYTVQAGKLLHINTDIEGVLKRSSSLKEVVSVLHPTPAVCGLPKQQAKDFILANEGYDRSYYTGFLGELNVKGDYLNKPKSHLFVNLRCMQIKQSEDKSDTAKAYLYMGCGITLESIPEKEWEESVNKSMTMKRVLDKMEQ

SEQ ID NO: 93907 - protein, 427 aa, Flexivirga sp.
  misc_feature (1)..(427): tr|A0A3M9MIA0|A0A3M9MIA0_9MICO Isochorismate synthase O S=Flexivirga sp. BO-16 OX=2294115 GN=EFY87_00865 PE=4 S V=1
MTLPLPQSHPALVVRSTRIQDPGDLVSLIPPGAEAPISWLRDGDGFVGWGTAAAIQTQGTARFEDAELWWSEVVRDAVVRSEVDLPGSGLIAVGSFAFAATSAAGGVLHVPATVVGRHHDVCWLTTVGTAAQLPATPALTAGAAPAPPVVADAYDGALTGEQWAGAVATAVGRIQSGALDKVVMARDVVVRSSTPIDPRHLLRNLSASYPNTWTYSVDGLIGATPELLVRRQKGLVTSRVLAGTIRRTGDDEHDLALAASLARSSKDLEEHEYAVRSVADALSPHCSSMNVPESPFVLHLPNVMHLATDVAGVLHEDVSSLTLAASLHPSAAVCGTPTLAARDLIAELEQMDRGRYAGPVGWLDADGDGEWGIALRCGALESPSQIRLFAGCGIVAGSHPSAELSESEAKLVPMLQALGCGAEGGRS

SEQ ID NO: 93908 - protein, 373 aa, Formosa agariphila
  misc_feature (1)..(373): tr|T2KKH6|T2KKH6_FORAG Isochorismate synthase OS=Formos a agariphila (strain DSM 15362 / KCTC 12365 / LMG 23005 / KMM 3901) OX=1347342 GN=BN863_12040 PE=4 SV=1
MHHDDFFESLNAQFQDALPFVAYRTPNENQVNAVFQHDDTLYETKDLSESGFVFAPFDDASKMVLMPLAASDLECCDAFEGTASEQVNSELVSTSNQKIAYIETIKKAISAIAQTDLKKVVLSRPDYVTKDNLEVFEVFKRLLATYKTAFVYCWYHPKIGLWLGATPETLLKIEGQRMSTMALAGTQVYKGTTEVSWGTKEAQEQQFVTDYIVSNLDAEVEHVSTSERRTVRAGGLLHLQTQISARLGKDYSGLLHIVRALHPTPAVCGLPKAEAKAFILEHEGYNREYYSGFMGELHFKKRQTRNTNRRNVENNVYATVKTVSNLYVNLRCMQVLPSKIALYVGGGITKDSNPEAEWEETVSKTSTMKKVLF

SEQ ID NO: 93909 - protein, 429 aa, Franconibacter pulveris
  misc_feature (1)..(429): tr|A0A0J8Y6N9|A0A0J8Y6N9_9ENTR Isochorismate synthase M enF OS=Franconibacter pulveris OX=435910 GN=menF PE=3 S V=1
MLSIEDALQRLADRLTTPLPDQPGLRRLCTPVTLSDASDPLAWLASQPFFPQFYWQQRSGSDEAAALGALKRFNSLPQAQAFLQQADEPELRIWGLNAFNPHEGDLFLSRLEWRRHEGQAWLCLHLWSETSLKEDARQATAFLNALQPARLLPPLNSRLVEECHIPDKEGWCERVRLATRAIHQQEMDKVVLARASDLRFGRPVCAAALMAASRRVNLNCYHFYMAFSEHDAFLGSSPERLWRRIDRALRTEALAGTIENHPDDHRAWALGQLLLADDKNQRENLLVVEDICQRIEKLGDGYDVLPPQVLRLRKVQHLRRCIWSTLFQPDDALCLQQLQPTAAVAGLPREAARLFIGEHEPFTRGWYAGSAGYLSLQQSEFCVSLRSAQVTGDTVRLYAGAGIVSGSDPEQEWQEIENKAAGLHTLLCR

SEQ ID NO: 93910 - protein, 429 aa, Frankia sp.
  misc_feature (1)..(429): tr|A0A166PW97|A0A166PW97_9ACTN Isochorismate synthase O S=Frankia sp. EI5c OX=683316 GN=UG55_103016 PE=4 SV=1
MLPLLTEPADLLADYRSGGSFLFASRRGVLLAEGAAALVAAGPWGLAADSISGELAGYTGLDQFAGAGWTGTRRSPIAVGVVPFDLNRPGRLVVPAAVRESEPLDVPVARPRNPAAAPDDSLDPLAPHPHPEPEMAVRASGRLEALPTPADYAAGVARAVRMLRAGELDKVVLARTLRVPGPVDAAALLRRLARRDPQAFVFGAQAPLPAIGQPGVYGSVGGTLVGASPELLLSRRGPLVVSNPLAGSAARSADPQEDRRRAAALLASAKDAHEHAVVVGAVADALRPFCLGLDVPAAPSLIRTATMWHLSTRISGWLADPSVSSLRLAAALHPTPAVCGWPTSAARAALNELEPFDRGSYTGLVGWCDAEGDGEWALAIRCAEIASDGSLRLFAGAGIVAESRPADELAETSAKFRTLGRAMGLGDDL

SEQ ID NO: 93911 - protein, 412 aa, Frankiales bacterium
  misc_feature (1)..(412): tr|A0A3A3ZEF6|A0A3A3ZEF6_9ACTN Isochorismate synthase O S=Frankiales bacterium YIM 75000 OX=2339232 GN=D5H78_16 345 PE=4 SV=1
MSTLPLTATLVRTRAVPDPGPLVGRLPGAGGLAWVRRGDGLVAWGEAARLEVSGPDRFAEAARWWREVCATILVDDPVGLPGTGAVALGSFAFGDDDGTRSVLVLPRVVLGRRGGRAWLTTVGDAPEADAVPEPVAAPVGVVYGEGAVSPVRYEEAVAEAVRLIAASPLEKVVLARDLLAVAEQPVDPRWLLGRLATRYPACWTFAVDGLVGATPELLVRLERGLVTSRVLAGTIRRTGDDDRDLVLAASLARSSKDLEEHEYAVRSVADALAPHCTGMNVPETPFVLHLPNVMHLATDVAAVAADRSSSLELAAALHPTAAVCGTPRDLALAAIDRLEGLDRGRYAGPVGWVDATGAGEWGIALRSAALDPDDPRRLTLYAGCGIVAGSDPEAELAESQAKLVPMRDALGA

SEQ ID NO: 93912 - protein, 424 aa, Frederiksenia canicola
  misc_feature (1)..(424): tr|A0A3N4WJ67|A0A3N4WJ67_9PAST Isochorismate synthase M enF OS=Frederiksenia canicola OX=123824 GN=menF PE=3 SV =1
MSIFAELKQQLTEKINALHCTTRWVELMAELPLASECDLLGWLKGQSHFPQSFWKNRDSDLTFATVGEAIAFEQLEDAQAFSSKTGFRLFGGLKFEGQCRLILPRLRFAKNSQKLTACLYLNGSNLAEEKAICADLLGNLNKTATLKPLENTIIQQSVACDFNRWQQNIEQAISAISQQHFRKVVMANATVLECEQDISPYDLLAASQQKNLGCYHFLWAENVADAFVGSSPERLYRRQDRQFETEALAGTAAVTQDAQETERNAQWLLQDEKNIFENQLVVDDIQHHLADCVTEFTVSTAQIKRLHNVQHLRRQIHATLKADINDAECLIRIHPTAAVAGLPRLSAVNFIQQHEPFERGWYAGTLGHFCPQEAEFCVALRSAAMMKNVITLYAGAGIVQGSEALLEWAEIERKALAILRLFKQ

SEQ ID NO: 93913 - protein, 478 aa, Frigoribacterium sp.
  misc_feature (1)..(478): tr|A0A1R4FML5|A0A1R4FML5_9MICO Isochorismate synthase @ Menaquinone-specific isochorismate synthase OS=Frigori bacterium sp. JB110 OX=1434829 GN=CZ774_08360 PE=4 SV=1
MRTSHRDAHVWTGFCRRSAHLDGRRQAFSGPEYGGLVTTDERLSLPKLVATTREVPPLDDPLLHASAGDPLAWIRRGDGIVGAGPELLRLDIGEDSRLEALTDIWHAIVQATDVDDEVQLPGTGLVAFGAFAFDEASDAPSTLIVPSTVIGRRGGRHWITRITRAEGADVPDVDEVGYGPQWSATLGPGRMDPAAHSDAVRDVLGRIADGEAEKVVIARDISGTVPAGADLRRLVSELAHGYPDTWTFAVDGLIGASPETLVTVSGGTVTARVLAGTIPRGADADEDTALSVELAKSDKNVEEHAFAIASVLEALRPYTATLEASETPSLLRLPNLWHLATDVTGTLSNGASALNLVRALHPTAAVGGTPRDVAMRIIRDVEPFDRGRYAGPVGWIDGNGDGEWAIALRCAQFGGAGDTTSTGDDEGDDPAAADWSRGANATRRVTAHAGGGIVSGSVPESELDETRVKFRPIVDALA

SEQ ID NO: 93914 - protein, 427 aa, Gallibacterium anatis
  misc_feature (1)..(427): tr|A0A263HKH0|A0A263HKH0_9PAST Isochorismate synthase M enF OS=Gallibacterium anatis OX=750 GN=menF PE=3 SV=1
MDVFQQLKSLLTTQIAIYQPDCRRFGEIQASIEASNIDLIAWLKGQAVFPQFYLQQRQQQYQIAAVGAVSHITSFEELTTFKQDYPHFNLVGGVQFLGEVKFILPRIYLHYQQQKLTVKLLFNQRIWQQEKQQLLQILQQLPHPQTCNDIKDITPILHHQSSTQSQWRQLIQNALNAIKQQQFNKVVLAREAVFHLDQPLNGYDFLALSRQTNQHCYHFAVVESAHSMFLGASPECLYRRTDSQFQTEALAGTAPIGETDEQQRQYQQWLLQDQKNLLENQFVVDDICQKIQPYCQKIEVGKVQLRQLRKVQHLCHPIDASLQPQHQYWEPLFALHPTAAVAGYPRQAALSFIKSNEPFQRGWYAGAIGVISHAFAEFCVGLRSAKLTHQQLHLFAGAGIVKESQADEEWQEIERKMSGLLSLFERK

SEQ ID NO: 93915 - protein, 427 aa, Gallibacterium genomosp.
  misc_feature (1)..(427): tr|A0A0A2Y6F7|A0A0A2Y6F7_9PAST Isochorismate synthase M enF OS=Gallibacterium genomosp. 1 OX=155515 GN=menF PE= 3 SV=1
MDVFQQLKSLLTTQIAIYQPDCRRFGEIQASIEASNIDLIAWLKGQAVFPQFYLQQRQQQYEIAAVGAVSHITSFEELTTFKQDYPHFNLVGGVQFLGEVKFILPRIYLHYQQQKLTVKLLFNQRIWQQEKQQLLQILQQLPHPQTCNEIKDITPILHHQSSTQSQWRQLIQNALNAIKQQQFNKVVLARETVFQLNQPLNGYDLLALSRQTNQHCYHFAIAESAHSIFLGASPECLYCRTDSDFQTEALAGTAPIGETDEQQRRYQQWLLQDQKNRLENQFVVDDICQKIQPYCQTIEVGKVQLRQLRKVQHLCHPIKATLQPQHQYWEPLFALHPTAAVAGYPRQPALSFIKNNEPFQRNWYAGAIGVITQSFAEFCVGLRSAELTNQQLHLFAGAGIVKESQADEEWLEIERKMSGLLSLFELK

SEQ ID NO: 93916 - protein, 427 aa, Gallibacterium salpingitidis
  misc_feature (1)..(427): tr|A0A1A7NSN0|A0A1A7NSN0_9PAST Isochorismate synthase M enF OS=Gallibacterium salpingitidis OX=505341 GN=menF P E=3 SV=1
MNVLQQIKTLLTEQIAIYQPSSQSFGEIQISLNSPAVDLLTWLKAQTLFPQFYFEQRKQEYVVATIGAIHTINDFTLLTQLKQEYPTFNFIGGVKFAGEIQFILPRLYLECRSHQVIVKLFIDHRNWSNERQKLSQDLALLTEQQPLTSISQIKPNLLSQSSDQRSWQQLIQNALIAMQKKQFAKVVLAQEMIFQLNKPLNAFDFLAASRLVNHHCYHFILAETADNIFLGASPECLYQRSANHFHTEALAGTAPIGETAQQQQKYQSWLLQDPKNLEENQFVVDDICHRLAPYCTEINIEKVQLRQLRKVQHLCHPIHATLAVEYTDWEPLFAIHPTAAVAGYPKQAAMDFITHNEPFKRNWYAGAIGVISQNFAELCVGLRSAKVTNTQLHLFAGAGIVKESKADEEWLEIERKMSGLLSLFEIN

SEQ ID NO: 93917 - protein, 145 aa, Ganoderma boninense
  misc_feature (1)..(145): tr|A0A5K1K2Q1|A0A5K1K2Q1_9APHY Salicylate biosynthesis isochorismate synthase ) OS=Ganoderma boninense OX=3445 8 GN=Q51508 PE=4 SV=1
MCVLFPLFLVDSPRTLADLLCIGFVYRFISTGTIEEKIFQRQANKQSLSSAVVDEKEDVERHFSLDALRKLFLFNENTLCETHETFKCKRCKDGRQFIKAPALLYGDASTWNHFTNGELRNNHDDLLRAEVGLPEVSFVFQYISH

SEQ ID NO: 93918 - protein, 532 aa, Geitlerinema sp.
  misc_feature (1)..(532): tr|K9S5L0|K9S5L0_9CYAN Isochorismate synthase OS=Geitle rinema sp. PCC 7407 OX=1173025 GN=GEI7407_0556 PE=4 SV= 1
MAKEGSRHGTILHRASVRLQTADCLSFGAWMRAGGFPSGDATLFNPVCRIAETFVIHLSMPATPSCANLLQSRRELLNLLLASHQVASHENQQQLISISLEINTIDPLAFLENFYQENQLHFYFEKPCQSVAIAAIDSVIHFQLEGQNRFQIAQQRIQQELKKIVAVGASETPFAGPHFFCGFTFSEAERSPKAPFPAATVFLPRWQVARHYQRTVLVANVAIAPQDSPEPLADLLWQRIQAIQAVSSLSPSPRSRPSQTFQQRDVVPVSQFQASVQRVLQDIADQAFHKVVLAHAVDVTAARAFRLPACLDNLRRLYPDCHVFSMGNGQGQNFLGASPERLISIRQQRLKTDALAGSAPRGATPQEDLRLAQDLRQSVKERHEHQLVLDFILQQLLALGLVPQRSPLPRILTLSNIQHLWTPIQAPVPPDVHPLEIVAALHPTPAVAGTPRAIACQQIGHHEPFARSLYAAPLGWVDYQGNSEFIVGIRSALLEGRHARLYAGVGIVAGSEPERELAEIKLKLQALLSALV

SEQ ID NO: 93919 - protein, 467 aa, Gemmatimonadales bacterium
  misc_feature (1)..(467): tr|A0A524IW40|A0A524IW40_9BACT Isochorismate synthase O S=Gemmatimonadales bacterium OX=2448054 GN=E4H28_02165 PE=4 SV=1
MRPRSPTSALSLRDMFLPGIDSPAADQPAVLLLAAELPPEADPLNLWLAISGESGAFWETEEETISGVGVCLRLDPAGVWTEQIRRVAAAVRVPTMDSSSGHAPEPRLLGSLPFAPDWVDEQWACLSRPGFVLPRWTMFRAAGLVTLQLAVEGPVDDAVRETIERDLASIESTLFGDSGTEQPWAQPSPARTPRDQDAASWQTAVESAVTAIREGLLQKVVLSRSVTHDFPYPVSPIALLRLLRESRAGRYRFGFRQGDTAFVGASPECLFDKRSNSVRVEALAGTYDLGPDNTADALIRATEHLFASGKDLEEHSLVVWGILDALGSMSDSVSADEWPVVRESQGLAHLSTNVTAELRPGVTPLTLIEALHPTPAVGGLPGSAALEFIRQVEPEPRGLFAAPVGWISPAGDACIAVAIRSALLTGDQARVYAGAGIVAGSDPAAEWEETAAKLRWLGKLGPEDEGA

SEQ ID NO: 93920 - protein, 429 aa, Gemmatimonadetes bacterium
  misc_feature (1)..(429): tr|A0A3M2FXZ9|A0A3M2FXZ9_9BACT Isochorismate synthase O S=Gemmatimonadetes bacterium OX=2026742 GN=D6675_14225 PE=4 SV=1
MMNRIEIPIPPLDPLIWLSHQSLPQKLFWANRDRTEIVAGSGVADVVRCENRLDACFQSFAEVTYPQRYWGGFRFDPTRPFGAEWRVTGNGYFVLPKFEVGLRENRWFLAGNFPEEKRAEVDVTLQQMRANVASFSPANHHSLVPAPPFLKRTDVPDKTGWIKAINTTLRQFVPHAFEKVVLARRSIFEADRGIDPVWILQKLAKANPNTFLFLMQFSADSAFISATPERLYARQQRILQSEALAGTRPRGRSPEEDDQLQHVLLHSEKDRREHRIVTTSIRQAFEPLCESVTVEDGVNVLKLSQLQHLYQRVEGVLLPDQGEADIINRLHPTPAVGGRPATRALQHIREWEVFDRGWYAAPVGWASADASEFAVGIRSGLVAGRRLYLYAGAGIVPGSHPAAEWQEIENKQNSFLRALGVYPHEKTVR

SEQ ID NO: 93921 - protein, 411 aa, Gemmatimonas aurantiaca
  misc_feature (1)..(411): tr|C1ACN7|C1ACN7_GEMAT Isochorismate synthase OS=Gemmat imonas aurantiaca (strain T-27 / DSM 14586 / JCM 11422 / NBRC 100505) OX=379066 GN=GAU_3222 PE=4 SV=1
MTALPFLLSSGPETFMASGVVERVRFARGAGLPAAVAACFAGTQAEDPHGVLVGAIPFDRARTLELLRPERVTRSATWEAAWAAHGGSAPQSSDDAQHGAFVPGVWHVVPQPTRAQYEAAVARATAHMVDDAEAAAADPLRKVVLSRSLQLNSTAPIDIRRLLARLRLDPSVTTFATPLPATPDGAARSLVGATPELLVAKSGRTVSSHPLAGSTRRRLVAADDRAAAEALLRSDKDQREHAAVVEAIADVLSPYCSSLDFARSPALVSTATMWHLGTRITGQLRDDAVSSLELLDVVHPTPAVCGVPQPRAQSLITELEGFDRDYFTGAVGWCDARGDGRWMVTIRCAEIAGTRARLYAGAGIVIGSDPAGEGAETSAKFETMLRALSAQEVLARAHRPVAAPAGEPQHA

SEQ ID NO: 93922 - protein, 460 aa, Geobacillus galactosidasius
  misc_feature (1)..(460): tr|A0A226QM49|A0A226QM49_9BACI Isochorismate synthase M enF OS=Geobacillus galactosidasius OX=883812 GN=menF PE =3 SV=1
MAILYQHKIQEQLRFIGKKANRPFISWSEEIDHVDPVYFFSLGQACSFRQRFYWSDRTNETVYVGLGCTYIIETEEKEQRFRTVETEWKRWMEQTASYSNGTDAVPIIFGGFSFDPFKPRTEKWRAFPHAKMIVPTVLLSLKNGKATLTVTMRSEQNEEIIKKIGMLIRLLYQEQKQQTSSLPPLITYKEVQKEEWFDAVKKTIENIRKGKFDKVVLAREARLSFADAIDPSVVLQQLREQQPFSYIFAFEQEGQCFIGASPEQLVKKEKDTCYSICLAGSIRRGKTLQEDEQLGKWLMNDEKNLREHQFVVQMIKEAIEAVCKRVQIPSSPQLLKLQHIQHLYTPVIGEKCRAASVLSIVEQMHPTPALGGTPREKAIKEIREAEPLDRGWYAAPIGWMDAEGNGEFAVAIRSGLLQGKEASIFAGCGVVGDSDPMSEYEETKVKFTPMLSALGVERDE

SEQ ID NO: 93923 - protein, 458 aa, Geobacillus kaustophilus; identical to SEQ ID NO: 93285
  misc_feature (1)..(458): tr|A0A4D7QCD8|A0A4D7QCD8_GEOKU Isochorismate synthase M enF OS=Geobacillus kaustophilus NBRC 102445 OX=1220595 GN=menF PE=3 SV=1

SEQ ID NO: 93924 - protein, 457 aa, Geobacillus lituanicus
  misc_feature (1)..(457): tr|A0A223DVB7|A0A223DVB7_9BACI Isochorismate synthase M enF OS=Geobacillus lituanicus OX=169283 GN=menF PE=3 SV =1
MAIGFQHTLQQQLHELAVRAARPFVSWTESLEGVDPVSFFMQGPSCGFRERFFWSDRSGGTILVGLGSVHAIETGEKDGRFREVDARRRQWASQIERHGDTDAPPLLFGGFSFDPHRTPTDVWRGFSAGKLIAPAVLLSMRNGQAKLTVTLPAGGGGREIEQVGRLLGRIAAPPLPAPLPALVAAREADSGRWMEAVRQAIASIRAGALDKVVLARARQLTFAGTIDAGSVLARLREQQPFAYLFAFEQDGRCLIGASPEQLVQKEGETCRSICLAGSARRGATVEEDERLGAWLLSDRKNRQEHQFVVRMISRLFAEVCEAVEMPDGPQLLKLPHIQHLCTPVVGRGCREPSVLRLVERMHPTPALGGTPRERAMETIRALEPLERGWYAAPIGWVDAYGDGEWAVAIRSALLAGSQAFLFAGCGIVADSDPQSEYEETNVKMAPMLSALGVMHHD

SEQ ID NO: 93925 - protein, 458 aa, Geobacillus sp.
  misc_feature (1)..(458): tr|L8A2A1|L8A2A1_9BACI Isochorismate synthase MenF OS=G eobacillus sp. GHH01 OX=1233873 GN=menF PE=3 SV=1
MAIGFRHHLQQQLHRLAVNAGRPFVSWTEPWEGVDPVSFFMQGPSCGFRERFFWADRTGGTILVGLGSVYAIETEKADSRFDDVEAGRRRWEKEMEPYGAADAPPLLFGGFSFDPYRPGTDMWRGFPAGKLVAPAALLAVRNGKTTLTVTVPTDKRGRDWERVGRLLERISDPMAAPKRLPRLVSDEEEEKERWLAAVREAIASIRAGALDKVVLARARRLAFAKTVDAAAVLQRLREQQPFAYIFAFEQDGRCFIGASPEQLVQKEGKMCRSVCLAGSVRRGAAMEEDERLGAWLRADRKNNEEHQFVVQMIGRLFSSVCETVEMPPAPQLLKLPHIQHLCTPVVGRGCRERSVLRLVEMMHPTPALGGTPRDRALEVIRALEPLDRGWYAAPIGWVDGEGNGEWAVAIRSALLAGKEAMLFAGCGIVADSDPNSEYEETNVKMAPMLSALGVMNDG

SEQ ID NO: 93926 - protein, 457 aa, Geobacillus stearothermophilus
  misc_feature (1)..(457): tr|A0A0K9HLX3|A0A0K9HLX3_GEOSE Isochorismate synthase M enF OS=Geobacillus stearothermophilus OX=1422 GN=menF P E=3 SV=1
MAIGFQHTLQQQLHELVVRAARPFVSWTESLEGVDPVSFFMQGPSCGFRERFFWSDRSDGTILVGLGSVHAIETGEKDGRFREVDARRRQWASQIERHGDTDAPPLLFGGFSFDPHRTPTDVWRGFSAGKLIAPAVLLSMRNGQAKLTVTLPAGGGGREIEQVGRLLGRIAAPPLPAPLPALVAAREADSGRWMEAVRQAIASIRAGALDKVVLARARQLTFAGTIDAGSVLARLREQQPFAYLFAFEQDGRCLIGASPEQLVQKEGETCRSICLAGSARRGATVEEDERLGAWLLSDRKNRQEHQFVVRMISRLFAEVCEAVEMPDGPQLLKLPHIQHLCTPVVGRGCREPSVLRLVERMHPTPALGGTPRERAMETIRALEPLERGWYAAPIGWVDAYGDGEWAVAIRSALLAGSQAFLFAGCGIVADSDPQSEYEETNVKMAPMLSALGVMHHD

SEQ ID NO: 93927 - protein, 458 aa, Geobacillus subterraneus
  misc_feature (1)..(458): tr|A0A143MMF1|A0A143MMF1_9BACI Isochorismate synthase M enF OS=Geobacillus subterraneus OX=129338 GN=menF PE=3 SV=1
MAIVFQHKIQQQLHELAASAARPFVSWTEPLEDIDPVSFFMQGPACGFRERFFWSDRSGGTVFVGLGSAYAIETEETDGRFQYIEQERQRWAGQIEQHGEADMPPLLFGGFSFDPHRPPASVWRGFSAGKLVAPAVLLSVKNGRTLLTVTLPAGGMERDMERIGRLLRRMEEPLPFSAEFPTVISDEEEEKERWLAAVHEAIASIRTGRLEKVVLARARRLAFNAVIDAAFVLRRLREQQPFAYLFAFEQDGRCFIGASPEQLVRKEGETCRSVCLAGSVRRGGSVAEDEQLGAWLQADSKNREEHQFVVRMIRSLFSSVCETVEMPAVPQLLKLPHIQHLCTPVVGRGCREPSVLRLVELMHPTPALGGTPRERAMEAIRSLEPLDRGWYAAPIGWVDADGNGEWAVAIRSGLLEGNKATLFAGCGIVAHSDPTSEYEETNVKMAPMLSALGVMNND

SEQ ID NO: 93928 - protein, 458 aa, Geobacillus thermocatenulatus
  misc_feature (1)..(458): tr|A0A226QB55|A0A226QB55_9BACI Isochorismate synthase M enF OS=Geobacillus thermocatenulatus OX=33938 GN=menF P E=3 SV=1
MAIGFRHHLQQQLHRLAVNAARPFVSWAEPWEGVDPVSFFMQGPSCGFRERFFWADRTGGTILVGLGSVYAIETEKADSRFDDVEAGRRRWEKEMEPYGAVDAPPLLFGGFSFDPYRPGTDIWRGFPAGKLVAPAALLAVRNGKTTLTVTMPTHQQGRDWERIGRLLERISGPMAAPKQLPRLVSDEEEEKERWLAAVHKAITSIRAGELDKVVLARARRLAFAKTVDAAAVLQRLREQQPFAYIFAFEQDGRCFIGASPEQLVQKEGKTCRSVCLAGSVRRGAAMEEDERLGAWLQADRKNNEEHQFVVQMIGRLFSSVCETVEMPPAPQLLKLPHIQHLCTPVVGRGCRERSVLRLVEMMHPTPALGGTPRDRALEVIRALEPLDRGWYAAPIGWVDGDGNGEWAVAIRSALLAGKEAMLFAGCGIVADSDPDSEYEETNVKMAPMLSALGVMNDG

SEQ ID NO: 93929 - protein, 458 aa, Geobacillus thermodenitrificans
  misc_feature (1)..(458): tr|A0A1W6VUY5|A0A1W6VUY5_GEOTD Isochorismate synthase M enF OS=Geobacillus thermodenitrificans OX=33940 GN=pchA PE=3 SV=1
MAIVSQHKIQQQLHELAANAARPFVSWTEPLEDIDPVSFFMQGPSCGFRERFFWSDRSGSTIFVGLGSAYTIETEETDGRFHYVEQQRQRWVEQIERHGEADMPPLLFGGFAFDPHQPRTSVWRGFPAGKLIAPTVLLSVKNGRTLLTVTLPTDGVERDMERIGRLFRRIEELQPVSATLPALVSDEEEEKERWLAAVRQAIASIRAGRLDKVVLARSRRLAFTGTIDAAAVLARLREQQPFAYLFAFEQDGRCFIGASPEQLVQKEGEMCQSVCLAGSVRRGSSPGEDEQLGAWLQADSKNREEHQFVVHMIRRVFSSVCETVEMPTAPQLLKLPHIQHLCTPVVGRGCQEPSVLRLVEMMHPTPALGGTPRERAMEAIRSLEPLDRGWYAAPIGWVDADGNGEWAVAIRSGLLDVDKAMLFAGCGIVAHSDPTSEYEETNVKMAPMLSALGVMSND

SEQ ID NO: 93930 - protein, 458 aa, Geobacillus thermoleovorans; identical to SEQ ID NO: 93348
  misc_feature (1)..(458): tr|G8N674|G8N674_GEOTH Isochorismate synthase MenF OS=G eobacillus thermoleovorans CCB_US3_UF5 OX=1111068 GN=me nF PE=3 SV=1

SEQ ID NO: 93931 - protein, 458 aa, Geobacillus zalihae
  misc_feature (1)..(458): tr|A0A1V9CN58|A0A1V9CN58_9BACI Isochorismate synthase M enF OS=Geobacillus zalihae OX=213419 GN=menF PE=3 SV=1
MAIGFRHHLQQQLHRLAVNAGRPFVSWTEPWEGVDPVSFFMQGPSCGFRERFFWADRTGGTILVGLGSVYAIETEKADSRFDDVEAGRRRWEKEMEPYGAADAPPLLFGGFSFDPYRPGTDMWRGFPAGKLVAPAALLAVRNGKTTLTVTVPTDKRGRDWERVGRLLERISDPMAAPKRLPRLVSDEEEEKERWLAAVREAIASIRAGALDKVVLARARRLAFAKTLDAAAVLQRLREQQPFAYIFAFEQDGRCFIGASPEQLVQKEGKMCRSVCLAGSVRRGAAMEEDERLGAWLRADRKNNEEHQFVVQMIGRLFSSVCETVEMPPAPQLLKLPHIQHLCTPVVGRGCRERSVLRLVEMMHPTPALGGTPRDRALEVIRALEPLDRGWYAAPIGWVDGEGNGEWAVAIRSALLAGKEAMLFAGCGIVADSDPNSEYEETNVKMAPMLSALGVMNDG

SEQ ID NO: 93932 - protein, 424 aa, Geodermatophilus sp.
  misc_feature (1)..(424): tr|A0A4Y9MJ50|A0A4Y9MJ50_9ACTN Isochorismate synthase O S=Geodermatophilus sp. DF01_2 OX=2559610 GN=E4P41_17610 PE=4 SV=1
MTAAALTSPGAVTPVVTTTPLADAPDLLALLPPAGALSWVRRGDGLVGWGEAARLEVTGPRALAEAATWWADHSAGLDVDDRTGVPGSGPVVFASIAFDPAAGTSVFVVPEVVVGRRDGVAWVTTVGDVDPAEVMDDAPEASPSPMGRLRYADGALDPASWCATVATAVERIDAGKLAKVVLARDLLVTADAPLDARSLLGRLAARFPDCWTFAVDGLLGATPELLLRRTGRQLSSRVLAGTAPRGAGADDDRLAAGLLSSAKDRAEHALAVDSLVGALDPYCTTLSAPEEPELLTLANVRHLATDVAGVQRRSGPRGGAGLLELVGAVHPTAAVCGTPTGAAAALIGELEGMDRGRYAGPVGWLDARGDGEFGLALRCAELSDGDPASARLFAGCGIVAGSDPAAELAETQAKFAAFQAALES

SEQ ID NO: 93933 - protein, 497 aa, Georgenia sp.
  misc_feature (1)..(497): tr|A0A5B8C955|A0A5B8C955_9MICO Isochorismate synthase O S=Georgenia sp. Z443 OX=2589797 GN=FE374_16205 PE=4 SV= 1
MTTSSSDAAGRARALRAVPAASRAAAASRAAALNGLPAVADLRARAAATATSTGSATTDDEPPESSPDLVVRTVEIPDVGDLLALLPSADPATTFSWVRRGEGIVGWGEALRLRTSGADRIRAADQAWARTVGRLHVLDEVRLPGSGAVAFGSFSFSPHSAAGGVLVVPGTVVGRRDGRSWLTTVHRVGETPSRGARLPAPAPVGEPGPVTYRDGALTPEAWRSAVAGVVRRIRAGEVAKVVMARDVVARAVAPLDVRHLLGRLAADYPGCWTFAVDHLVGATPELLVRREKGLAACRVLAGTIERTGDDAADLRRAAELARSSKDLEEHELAVASLVRALRPYCASINVPDAPFVLHLPNVMHLASDVTGAVDAALGHPSTYLSHAGGGNGPSSLALAAALHPTAAVGGTPTGLATAILASAEQMDRGRYAGPVGWIGADGDGEWGIGLRSGELSASDPHEVRLFAGCGVVAASDPDAELAETEAKLRPMREALGG

SEQ ID NO: 93934 - protein, 374 aa, Glaciibacter sp.
  misc_feature (1)..(374): tr|A0A4S4FJ08|A0A4S4FJ08_9MICO Isochorismate synthase O S=Glaciibacter sp. YIM 131861 OX=2565934 GN=E6C70_16240 PE=4 SV=1
MRGGDGIAGYGEALRLEFSGPDRLTDAAAAWRDVVARAQIDDDVRLPGSGLVAFGTFAFADESNATSVLIVPELIVGRRGSKAWVTRIGDGAGIDPVMRAFGDDFRVTLRAGQTSPADYVDAVSTAVGRINDDELGKVVLARDLIGRLPAGSDVRRIAAELAIGYPDCWTFCVDGMVGASPETLVRSEKGTVSARVLAGTLPRGRDDRADAEAADSLARSPKNTAEHAFAVRSVLDTLGRHTIRLQKSQPFTLRLPNLWHLATDVEGVLHDGSTSLDLVADMHPTAAVAGTPTDAALAVIRSLEKFDRGRYAGPVGWIDAHGDGEWAIALRCAQVDEDDVVHAYAGCGIVGDSDPAAELAESRIKFRPIVEALA

SEQ ID NO: 93935 - protein, 416 aa, Glaciihabitans sp.
  misc_feature (1)..(416): tr|A0A4V6MTP6|A0A4V6MTP6_9MICO Isochorismate synthase O S=Glaciihabitans sp. RP-3-7 OX=2528207 GN=EYE40_14195 P E=4 SV=1
MSEPAAVLPALTVRTLALDEIGPLVPLLDPRDPLLFVRRGQGVAGFGEAVRLEFTGEDRMREASAAWRELVSLSEVSDAVDLPGTGLIALGSFAFSRDSAATSVLIVPSVIVGRRDGKAWITRIVTTGSDAPDAPVPTPTAFGPEYRISLLPGAMKAEAFTAAVDSAIAAIAAGTVRKVVIARDLVGHLPEGADLRRVLSDLAVGYPDCFTYSVNGFIGSSPETLVRVDHGEVSARVLAGSIGRGSDADSDQDAAVALATSTKDLDEHAFALASVLRVLEPHSNTLMASELPFTLKLPNLWHLASDVEGRLSDGSSSLDLIAALHPTAAVAGAPTGEAMDLIEQLEPFDRGRYAGPVGWVGANGDGEWAVALRCAHVSSTGRITAYAGAGIVVGSEPERELAETKMKFRPIVEAFR

SEQ ID NO: 93936 - protein, 424 aa, Glaesserella parasuis
  misc_feature (1)..(424): tr|U4SHT4|U4SHT4_HAEPR Isochorismate synthase MenF OS=G laesserella parasuis D74 OX=1275971 GN=menF PE=3 SV=1
MSVFSQLKQQLYQQLQQKPVAQGLVQLQAEIAIDLENQQLLAWLKAQPLFPHYYWQNRDTEQTIVAVGAVQTFEHLDDVEQFSKQSDLMVVGGIEFEGQCHFVLPRLLLVKNEKNITAWLNLDGRHFESEQKECIALLAQFEQTAELHPIENSLLSTKVACDFSRWQHNIELAIEQIQQQQMNKVVLANATTKTFTHLISPYVLLFASQQKNLGCYHFLWSEKQGEAFIGSTPERLYLRQQRQFFTEALAGTVAVTDDPVKTEQNALWLLNDQKNIYENWLVVDDICSHLADCATDIQVSDAEIKRLHNVQHLRRKIQTQLTEQVSDADCLARIHPTAAVAGLPRPKAKQFIQQQECFERGWYAGALGYFTPEQAEFCVMLRSALIQANQITFYAGAGIVEKSDPQSEWQEIDRKARAMVGLME

SEQ ID NO: 93937 - protein, 424 aa, Glaesserella sp.
  misc_feature (1)..(424): tr|A0A328BVT2|A0A328BVT2_9PAST Isochorismate synthase M enF OS=Glaesserella sp. HHC-2018 OX=2094024 GN=menF PE= 3 SV=1
MSLFNPLQQQLLQQLQQMPLQQGIVQLRAEIAVDLANHQLLAWLKAKSLFPHYYWQNRDTAQTLVAVGAVRAFHQLDDVEQFRQQSDLMIVGGTEFDGQCHFILPRLLLVKDETKLTACLIVDCDHLAQEQAECIALLAQFEQVSELLPIKNQWVRTQSACEFEHWQANIALAIEQIQQQQMNKVVLANATTKTFQQPISPYDLLFASQQKNLGCYHFLWSEERGEAFIGSSPERLYLRQGRHFFTEALAGTVAVTADPEQTEQNALWLLNDQKNIYENWLVVDDICSHLADCAADIQVGDAEIKRLHNVQHLRRQIQTVLAEQVSDGDCLARIHPTAAVAGLPRPTAKQFIQQHECFERGWYAGALGYFTPEQAEFCVMLRSALIKQNQITFYAGAGIVEKSDPQSEWQEIERKAQAMAGLMN

SEQ ID NO: 93938 - protein, 467 aa, Gloeocapsa sp.
  misc_feature (1)..(467): tr|K9XH08|K9XH08_9CHRO Isochorismate synthase OS=Gloeoc apsa sp. PCC 7428 OX=1173026 GN=Glo7428_3303 PE=4 SV=1
MPVLPCHPHTFVYHNELYQFLSYCQQNVANDSQIVSVSLEIDSVDPLIVLQQIAEPNQQSFYFENKSKNQAIAAIDAVTKLQTCGANRFAQAQHFINSCLAQTITVGTSKDAISPHFFCSFSFFDEITQSNYPFSAATVFLPRWQISRNGDRCILVANFLIDAETNLDRLYQDWCQIVRTINFLKHTATAINNTNSIICNEEKNIKNFKKTIASCLELIESNYFQKIVLAHPLDVTYEEPIDLLRSLDNLRSIHPGCYIFAISNGKGQNFIGASPERLISIHNQQLSTDALAGSAPRGKTLAEDTMLANSLLTSAKERHEHRVVSDFITQCLYQLEITPQILPPRLRQLSNIQHLWTPIQAQLPTHVHPLEIVAALHPTPAVAGVARDKACTKIRDYETFERGLYAAPIGWLDAQGNSEFIVGIRSALIDRDRARLYAGAGIVAGSNPDREVAEIQLKLQALLKALV

SEQ ID NO: 93939 - protein, 445 aa, Glutamicibacter arilaitensis
  misc_feature (1)..(445): tr|E1VYD3|E1VYD3_GLUAR Isochorismate synthase OS=Glutam icibacter arilaitensis (strain DSM 16368 / CIP 108037 / IAM 15318 / JCM 13566 / Re117) OX=861360 GN=menF PE=4 SV=1
MSADSPVLSASAHQPLAPVLTSITFEYLDAPETLVADSLRHRSMVWTRNGHGLVGFGTAARLHTHGEERFARARAWFAQVVEQAQIVDPISRPGSGLVSFGSFAFSFTSVFESRMVIPQLVIGRDEEKSWITVTGSAKELEGLTYQQALARAEAAMADASAPKSAPGRIELTSGQLTAGSYLQAVDQALSRFEERGISKLVLARDVLAHSSTSIDLAGVMAALTERYGNCWTYSVDGLVGATPEMLVRVTDGLAEARVLAGTLDRAAAGAQEPGFAQRNLFEDPKQRNEHQLAIDSLTDSLNPISHGMNAPEEPFILELPNVWHLASDVRAQLRADTAGVLPTALDVAEIFHPTAAVCGTPTKKAGVLLRELEGLDRGPYAGPVGWVDSRGDGEFGIALRGGILEDEKLMRLYAGCGIVPGSVPEDELAESWAKMRPMRQALGAE

SEQ ID NO: 93940 - protein, 445 aa, Glutamicibacter halophytocola
  misc_feature (1)..(445): tr|A0A5B8IKR5|A0A5B8IKR5_9MICC Isochorismate synthase O S=Glutamicibacter halophytocola OX=1933880 GN=FQA45_063 75 PE=4 SV=1
MSADSPVLSASAHQLSAPSLTSITFEYVDAPQTLLGDSLRHRSLVWTRNGHGLVGFGTAARLHTHGEERFARARAWFAQIIENARIIDPLNRPGTGLVSFGSFAFSFTSVFESRMIIPQLVIGRDEQTAWITLTGTSEELDGVTYEQALARASALMADAAIPEAAAGSIKLTSGQLTAGSYVEAVKKALRHFDERGISKLVLARDVLAHSSTPIDLSKVVHALTERYGNCWTYSVDGLVGATPEMLVRVTDGLAEARVLAGTLDRAAAGADDPGFAQHRLFEDPKQRNEHQLAIDSLTHSLNPISHGMSAPEEPFILQLPNVWHLASDVRAQLRADTTGALPSALDVAEIFHPTAAVCGTPTKKAGVLLRELEGMDRGPYAGPVGWVDSRGDGEFGIALRGGILEDEKLMRLYAGCGIVPGSIPEDELAESWAKMRPMRQALGAE

SEQ ID NO: 93941 - protein, 445 aa, Glutamicibacter sp.
  misc_feature (1)..(445): tr|A0A4Q0ALY9|A0A4Q0ALY9_9MICC Isochorismate synthase O S=Glutamicibacter sp. HZAU OX=2049891 GN=EKH49_12280 PE =4 SV=1
MSADSPVLSASAHQPSAPVLTSITFEYLDAPETLLADSLRHRSLVWTRNGHGLVGFGTAARLHTHGEERFARARAWFAQVIEQARIIDPISRPGSGLVSFGSFAFSFTSVFESRMVIPQLVIGRDEEKSWITVTGSAEEIDGLTYQQALARAESAMADASLPAAEPGSIELTSGQLTAGSYLEAVDHALGYFEERGISKLVLARDVLAHSSTPINLARVVDALTEQYGNCWTYSVDGLVGATPEMLVRVTGGLAEARVLAGTLDRAAAGAEDPDFAHRNLFEDPKQRNEHQLAIDSLTASLNPISHGMNAPEEPFILQLPNVWHLASDVRAQLRADAAGTLPTALDVAEIFHPTAAVCGTPTKKAGVLLRELEGMDRGPYAGPVGWVDSRGDGEFGIALRGGILEDEKLMRLYAGCGIVPGSVPEDELAESWAKMRPMRQALGAE

SEQ ID NO: 93942 - protein, 563 aa, Glycine soja
  misc_feature (1)..(563): tr|A0A0B2P628|A0A0B2P628_GLYSO Isochorismate synthase, chloroplastic OS=Glycine soja OX=3848 GN=D0Y65_001066 P E=4 SV=1
MAMGTVHKWLTHFTDTKKCNNILVPPASKEQQSIYFLQYHRPVYQRCHLSMNGCREGQHQYSRTRNPVGTIETKTLAPVASPAMAMYSLNMAISELESEAPFGTSSGIVRVQVPIEEQVEAIDWLLSQNHLLLPRCFFFGRKQYSPCCNGEEKLVSVAGVGSAVFFSQPHPFSYWDWISIRRFLSERCPLIRAYGAIRFNAKAKVSSEWLAFGSFYFMIPQVEFNELEGGSMLTITIAWDNNLSWSWENAINALQETLRNVSSSIVKFPKQTPPTLISSSHNIPSKVDWDLAVNGALQMIKRNDSLLTKVVLARSTRVVPTADIDPLAWLSCLKVEGENAYQFLLQPPNAPAFIGNTPEQLFHRKCLHITSEALAGTRARGASQALDCQIELDLLTSPKDDIEFTIVRDTIRRKLEAVCEKVVIKPEKMIRKLPRIQHLYSQLSGRLRSEEDEFEILSSLHPSPAVCGFPTEEAQLLIAETEVFDRGMYAGPVGWFGGGESEFAVGIRSALVEKDLGAFIYAGTGIVEGSSPYLEWDELELKTSQFTKLLKLDLPRRQKVDCK

SEQ ID NO: 93943 - protein, 380 aa, Goodfellowiella sp.
  misc_feature (1)..(380): tr|A0A5B2XPZ6|A0A5B2XPZ6_9PSEU Isochorismate synthase O S=Goodfellowiella sp. AN110305 OX=1892852 GN=F0L68_0695 5 PE=4 SV=1
MSWVRAGQGLVGWGEAARFEAHGPDRFAEVDRWWRDYVAGVDVHNELGVPGTGPTAFVSMAFADEPGHSVLIVPEVVIGQRDGVSWVTEIGRSAVTRPLAKPVRRPKRVHYTEGELTVDGYRDAVRAAVTRMKAGELGKVVLAHDVLATTDGPIDVRFLLRELAARYPNCWAYAVDGLIGATPELLLRRTGQVVSSRVLAGTTWPRPGVSDDDLAAALLGSRKDQDEHAYAVASLADTLRPFCATMTVDEQPSVLRLHNVLHLSSEVGGILDRETSLLRLSEAVHPTAAVGGTPRQLAIPLIRELEGMDRGRYAGPIGWIDGNGDGEMGVALRCAKVDGSTARLFAGCGIVADSDPDTEVREAAAKLVPMREALEGADRS

SEQ ID NO: 93944 - protein, 405 aa, Gordonia polyisoprenivorans
  misc_feature (1)..(405): tr|H6N1S5|H6N1S5_GORPV Isochorismate synthase OS=Gordon ia polyisoprenivorans (strain DSM 44266 / VH2) OX=11122 04 GN=GPOL_c23640 PE=4 SV=1
MISSPTSAEHTPDALGTATALSGTANDAHFLLCRNTYHVIGMGRSTVYRSAEAAASALRDGAVTAVVGALPFDIREQVSLIAPDRIELHHGRWIPQTVALGDHRAGRPVAQSRIVAAVPSPADHRRRIATAIDRLADPHDALAKVVLARALTVHSAVPVTGWEVAARLRTIDPRGSVFVTDLPGPTSGSLSQLVGASPEVLIRKRGNIVSAYPLAGSSARLTDSRLDAEQGRALANSTKDRTEHRFVVDALRAALAPLCRTLDVPDEPELMTTPTMWHLGTPIRGEIADPSTTALDLAMAVHPTPAICGTPTDLARDHIVATEGRRGFYAGAIGWAGAPTRGRDGTIVAGDGEWMVAIRCAEIAPGGREITTWAGGGIVADSDPDTELAETDAKFATILAALGIR

SEQ ID NO: 93945 - protein, 355 aa, Gordonia rubripertincta
  misc_feature (1)..(355): tr|A0A222TPI1|A0A222TPI1_GORRU Isochorismate synthase D hbC OS=Gordonia rubripertincta OX=36822 GN=dhbC PE=4 SV =1
MLSRPHGTVRGEGVVRSFTDVDGASAALREGEVESLTGAIPFDVRDPAALVAPARLRTGEPPLPGTGPLSRRAISTVLHPDAEEHRERVAHAVKRIVAGDVGKVVLARSVDLVLDEPVRPAEFVDALAGGNSGHNAFGVDVGAATGSGTWLIGASPEVLLRKSGSTVTCHPYAGSAPRSADPAVDRATADELLSSAKDLAEHAFVVDHLRERLGLLCDDIDAPTAPKLESTGEVWHLATPIRATLRDPATTALDLALLLGPTPAVCGTPSDVAAQIIRDVEGDRGFYAGAVGWCDAAGDGEWMVTIRCAELAADGRSLRTWAGGGIVEHSDPQAELDETAFKLRTVLNALGIRTI

SEQ ID NO: 93946 - protein, 365 aa, Gordonia sp.
  misc_feature (1)..(365): tr|A0A3N4G1Z1|A0A3N4G1Z1_9ACTN Isochorismate synthase O S=Gordonia sp. RS15-1S OX=2487349 GN=EF294_19820 PE=4 S V=1
MSGKPVTDVGTGPAPFVLSRPHGVVRAEGIGRRFTAVSDAVSALRSGAADAVVGALPFDPTDPAALFAPGRLHREQALGGRAPVRHSLTHLVEIPDAATHRERVRRAVAAIHAGDVDKVVLARTVGAMLDSPIGIGVLLDALAHGNSEHNAFAVDTGHSWLLGASPELLLHKSGREVTCHPYAGSAPRSSDPEADREARDELAASGKDHREHAFVVEHLRERLAPISEELSVATRPQLLSTGEMWHLATPIRARLADPDVGALDLALRLSPTPAVCGTPTETAAQFIRDHEEPRGLYAGAVGWADAQGNGEWMVTIRCLELNADRQTFRTWAGGGIVADSDPDAELAETTAKLRTVLRALGVDAR

SEQ ID NO: 93947 - protein, 358 aa, Gordonia terrae; identical to SEQ ID NO: 93667
  misc_feature (1)..(358): tr|A0A4V6LC09|A0A4V6LC09_9ACTN Isochorismate synthase d hbC OS=Gordonia terrae OX=2055 GN=dhbC PE=4 SV=1

SEQ ID NO: 93948 - protein, 467 aa, Gracilibacillus dipsosauri
  misc_feature (1)..(467): tr|A0A317L2U7|A0A317L2U7_9BACI Isochorismate synthase M enF OS=Gracilibacillus dipsosauri OX=178340 GN=menF PE= 3 SV=1
MIETKELNIDGVLQTARKQANKKQTPAFVSITEQIEELDPLAFFNTGKYLGLTRTFWTNTDRSIYFVGVGNAYTMQAINQPYTTIKQQWQELINDAIIDNPYPNSSAGPIVLGGFPFDQANEKDLSLWKGFEGSQFRLPRFMLTKDKEKYYFTINVFVEPNSNTSQLEQQLQIESQQLLNGKEMITYTNAIHLQHEVDPEQWKDLVQKVTNDISEGKVDKIVLARELQIELKDNCDLTEVLRNLLIMQPNSYVFAWEKNNACFIGATPERLVQVNKKQLFSTCLAGTAPRGKDKKDDDVIGQALLQDEKNQKEHQFVVDMIRGAVTSCARKVHIPDKPILYPLKNLQHLYTPVQAELKRGHTILDVVAKLHPTPALSGYPSETSLSFIREFETLERGWYGAPIGWMDDQFNGEFAVAIRSALVRENKVSLFAGCGVVEDSDPEQEYKETSIKFTPMLQALGGHYELS

SEQ ID NO: 93949 - protein, 460 aa, Gracilibacillus halophilus
  misc_feature (1)..(460): tr|N4WLU2|N4WLU2_9BACI Isochorismate synthase MenF OS=G racilibacillus halophilus YIM-C55.5 OX=1308866 GN=menF PE=3 SV=1
MIEIKEINIEQALQKAKTKAIEQGKRALLSIAEPIAPIDPILFFQSGSQYQVPRTFWSSADHDFFLVGIGNEMTLHANNDTYRQISVLWQELLEHTVVEHPFSNQKVGPIAFGGFPFDADTNQYWQGFEGSQFRVPRFLLTKDKDHYFLTINVMVEHDEDIETLSAQLVEDKQYLLSAPFHPLFTNAIASKQEKQTEEWKQLVRQATAEIRENKMSKVVLARQMEVTYHHEIVISQVLEHLRREQKNSYLFAWETEDACFVGATPERLVRVDEQHLLSTCLAGTAPRGESAEKDEQMGSFLMNDQKNRREHQFVVDMIQEAVRSFAENVHIPDEPQLYRLKNLQHLYTPVRAKLRDEYTILDVVAKLHPTPALSGFPRLASLHFIRKYEQMQRGWYGAPIGWIDQDFNGEFAVAIRSALVNKSSATLFAGCGVVEDSDPDIEFSETTIKFTPMLQALGGL

SEQ ID NO: 93950 - protein, 463 aa, Gracilibacillus kekensis
  misc_feature (1)..(463): tr|A0A1M7ML85|A0A1M7ML85_9BACI Isochorismate synthase M enF OS=Gracilibacillus kekensis OX=1027249 GN=menF PE=3 SV=1
MIETKDLDIDGVLQAAQKQSIGKAAPTFVSITEQIAWIDPIQFFQAGKGLQENRMFWSSADQSTQFVGIGDAVLLQNQDGSYHQLTNEWEQVLKNSWVDNPYDQYKTGPIAFGGFPFDSDEKVNELWKGFEGSQFRVPTFLLTVENDSAFLTTTVYVKEESNIDELSADLVTKRNQLIHAPEPIFQKNAIVLKHEVDPVQWRELVVKVTDTIEQDDVDKIVLARELQIEFEDICDIGQVLNTLKNTQEHSFVFAWEKDDVCFVGATPERLVKVDNQQLFSTCLAGTSPRGKSLKEDNWYGQQLLNDQKNREEHQFVVDMIKSAVHSCAKYVEIPDQPSLYRLKNLQHLYTPVKAELKKGYTLLDVVEKLHPTPALCGFPRESSLAFIRKFELLERGWYGAPIGWFDQHFNGEFAVAIRSALIDQDKASLFAGCGVVKGSDPEIEYQETNIKFTPMLQALGGSL

SEQ ID NO: 93951 - protein, 461 aa, Gracilibacillus orientalis
  misc_feature (1)..(461): tr|A0A1I4R7G2|A0A1I4R7G2_9BACI Isochorismate synthase M enF OS=Gracilibacillus orientalis OX=334253 GN=menF PE= 3 SV=1
MIETKEIKIDGVLQSAQKQSIDKSAPTFVSVTEQIEWIDPIDFFQAGKAIEENRLYWSSADQKTQFVGIGDALLFHDEDASYQDLKEKWKQTLENSWIANPFSQYKTGPIAFGGFPFDAKEKVEELWEGFSGSQFRVPTFLLTSENDKSFLTMTVYVEQGSNVDQLAAELITRKNQLLHAPKPEYQENHTVLKHEVDPVEWKKLVNKATTTIYSKNVDKIVLARELQIEFDEICDIGQVLDRLQKTQKNSFIFAWEKDDVCFVGATPERLVKVDNQQLFSACLAGTAPRGKTKEEDNDFGQQLLHDQKNRNEHKIVVDMIKEAVCSFAKYVEIPEQPTLYPLKNLQHLFTPVQAELDQGYTLLDVVEKLHPTPALCGFPRESSLDFIREFEQLERGWYGAPIGWFDQYFDGEFAVAIRSALVSGDKATLFAGCGVVEDSDPEIEYQETNIKFTPMLQALGG

SEQ ID NO: 93952 - protein, 488 aa, Gracilimonas mengyeensis
  misc_feature (1)..(488): tr|A0A521AN79|A0A521AN79_9BACT Isochorismate synthase M enF OS=Gracilimonas mengyeensis OX=1302730 GN=menF PE=3 SV=1
MDSENPVLNNVKECFRQQISQIELKDAIDIVANQPVNKYHYLSVSIRIPKVDVLAVLEQHAPQKTFRYYWEKPSDEFAIAAGGQVERIQTTGDQRFREASTEGKKLLEKVHHLTKVQHHMASVHLLGGFSFFDHNIGQNWRDYGAGSFTLPEWLIINNGDLSLLTVTQKVKSGDRASDIYEQFVETINQLHEICSVEGYKIQKRPLFNSKVDTPGANSPAFKNWKESVENATELIKNEAFKKIVLARELKVQLQESVSDTHILNYLRSQYPDCYSFLVSQNGKSSFIGSTPERLASFKERHVLTEGLAGSISRGKTASEDAVLEHQLLHSHKDLSEHAFVLDAIGEHLEQYSEVYEYPEKPGIKKLSNVQHLYTPVHARIKKGVSRTEVLSRLHPTPAVGGYPREEAMPYISKLEHFDRGWYAAPIGWINTSGEGEFVVAIRSGLIKEDEVRFFAGCGIVEDSDPKKEWDETNLKFIPMLTALEHARR

SEQ ID NO: 93953 - protein, 380 aa, Gramella flava
  misc_feature (1)..(380): tr|A0A1L7I141|A0A1L7I141_9FLAO Isochorismate synthase O S=Gramella flava JLT2011 OX=1229726 GN=GRFL_0141 PE=4 S V=1
MTKEDFFQKIQQQLKAQKAFVCYRKPGQALANLLLQQDYTAHELTDFSENGFVFAPFDRNGKTYLIPQNTSETIQFELAEVLITDEETSSDYEGSYVGAEEDQKDHELLVQKGIDAIRDQRFRKVVLSRSELVELNDPSPMPIFKKLLQKYREAFVYCWFHPKTGLWMGATPETLLQVERDRFETMALAGTQVNKGQEQIEWGQKELEEQLLVTDFILNALEGLPEIKIGEISKPYSAHAGTLLHIRTDISGKVSQAEDQSKLIEALHPTPAVCGLPRKEALEFIQKHEHYDREYYSGFLGELNFKTEKKRNGNRRNQENQQFSAILKQTSLYVNLRCMKLKDGDARIYIGGGITRDSDPAHEWMETVNKAQTMKSVLVK

SEQ ID NO: 93954 - protein, 383 aa, Gramella forsetii
  misc_feature (1)..(383): tr|A0M346|A0M346_GRAFK Isochorismate synthase OS=Gramel la forsetii (strain KT0803) OX=411154 GN=GFO_2076 PE=4 SV=1
MIEQVDFFQKLNNHVQDQKAFVVYRKPGSNTVKSLFQKDTVSHKVSDLSESGFVFAPFNAEADSYLIPAENSNFFEFEYPAASVLDDRSNEKMSSTIDFEFMEKDQKIHENLVQEGINSIKEEKFQKVVLSRSERVQLYDPDPIRILKNLLNKYAQAFVYLWFHPDTGYWLGATPETLLNVERNRFKTMALAGTQMFKGNMDVEWEPKEVEEQKFVTDYILESLQKAKGVENINATNPYSAMAGNLLHICTDISGRLNSLDDLEELVKTLHPTPAVCGLPKEKALQFILKNEDYSREFYSGYLGELNIKSENKRNSNRRNQENQQFTAISKQTDLFVNLRCMKLKDGNARVYIGGGITKDSNAADEWMETVNKAQTMKAVLVK

SEQ ID NO: 93955 - protein, 357 aa, Gramella jeungdoensis
  misc_feature (1)..(357): tr|A0A4Y8AV30|A0A4Y8AV30_9FLAO Isochorismate synthase O S=Gramella jeungdoensis OX=708091 GN=E2488_00720 PE=4 S V=1
MSLSSNIDTFFEKINDVYNTSVPFVVFRKPNDTKITALYQNSSALYLLKSFEESGFIFSPFNKNESKILLPSNNCNKFSAVIEKDFNVSKIVSEFKFDENLEAKNQHMSIVQDAIDFIHTNQAKKIVLSRGEKVSCNEIEVFNVLKKMLNSYKNAFVYLWFHPKVGLWMGATPERLISIDKQLNLKTMALAGTQKFNGTLEVKWEEKELLEQQYVTDYILENIKDNTYKIETKGPYTTKAGSLLHLLTDISATLKAPNLLGNLINALHPTPAICGIPQNIATEFILKNENYNRAFYSGYLGELNINDATNLFVNLRCMQIKENKANLYIGGGITNKSIAENEWDETVAKAEIMKQVL

SEQ ID NO: 93956 - protein, 432 aa, Grimontella sp.
  misc_feature (1)..(432): tr|A0A318GHB5|A0A318GHB5_9GAMM Isochorismate synthase M enF OS=Grimontella sp. AG753 OX=2183905 GN=menF PE=3 SV =1
MLSISVALEQLREKLSGIDANSPGFYVFDVAFALNDAFDPLTFLASQPCFPQFYWQQRSGEDEAAALGQVLRFPSLAEARHFLNDNPEHDLRAWGLNAFDPQQGELFLPRLEWRREGGRASLRLIVLNGNAQQNDVAQARSFIDALVRAKSLPDVQMELVSQHHFPQQSGWEALVTQATQAITRGEMDKVVLARATDYHFSQPVNAAAVMAASRRLNHHCFHFFIAFDPHNAFLGSSPERLWRRRGTSLRTEALAGTVGNDTDDTRATELGDWLMNDDKNQRENMLVVEDICQRLQHATSTLDVLPPQIVRLRKVQHLRRCIWTEMHHNDDAQCLTLLQPTAAVAGLPRLAARAFITQHEPFEREWYAGSAGYLSLKQSEFCVALRCAKISGTTVRLYAGAGIVAGSDPTMEWQEIENKAAGLRSLLIMKHV

SEQ ID NO: 93957 - protein, 438 aa, Grimontia celer
  misc_feature (1)..(438): tr|A0A128EZY9|A0A128EZY9_9GAMM Isochorismate synthase M enF OS=Grimontia celer OX=1796497 GN=menF PE=3 SV=1
MTDLSQAIARLVESLSTVSPLPKQITLPFQWPERTDPIDWLHTQPLFPKFYWQTRDGTEQVLALGQVKTFSDPASAERQLVKGQRIWGGRSFDGRTERNQRCLQSFFFLPQIEMACREGQWSITLNLCDDLLKVRAALSKLITQSQRLSPPDCDVLATQHQPEFDQWSAMLGDALSAIETTELQKVVLARKTTLELDRALPAASLLKATVEINKSNFHFLLALDEKHCFVGSTPERLFWRNDSELYTEALAGTIGRGKDAEEDLSLATWLLNDSKNIYENRLVVDDITQRLNPHSEQLDVEVTPHLVRLRNVQHLKRDIEANLVADVPSSTLLDLLQPTAAVAGLPREKAVDFIVENEPFVRGWYSGSVGYLSPEQSEFCVAIRSALIVDNKVHLFAGAGIVPGSVAESEWKELDRKMATLRNLLGPSPDKHMEKKAG

SEQ ID NO: 93958 - protein, 438 aa, Grimontia hollisae
  misc_feature (1)..(438): tr|A0A377HL02|A0A377HL02_GRIHO Isochorismate synthase M enF OS=Grimontia hollisae OX=673 GN=menF PE=3 SV=1
MTDLSHAIARLVESLSTMSPLPSQIAQPFCWPAHTDPMDWLHAQPLFPKFYWQTRDANEEVLALGQVRTFSDPASAEAVLAKGQRVWGGRSFDGRTERNQRCLQSFFFLPQIEVTRSGTAWEIRVNLGDDLLKVRAALSRLSCAAQHIGKPDCEVLATVHQPVFSDWSTMIDEALESIETTSLQKVVLARKTILDLDRPLSAASLLKASRDLNVSNFHFMLALDEKHCFVGSTPERLFWRHNRELYTEALAGTIGRGKDAEEDLFLATWLLNDNKNIYENRLVVDDITQRLAPYSDKVDVEQTPRLVRLRNVQHLKRDIEGVLEENVSSSTLLDTLQPTAAVAGLPRDMAVDFIAKHEPFARGWYSGSVGYLSQEQSEFCVAIRSALVVADKVHLFAGAGIVPGSDAESEWKELDRKMATLRNLLGPSPDKQMEKKAG

SEQ ID NO: 93959 - protein, 438 aa, Grimontia indica
  misc_feature (1)..(438): tr|R1GZN1|R1GZN1_9GAMM Isochorismate synthase MenF OS=G rimontia indica OX=1056512 GN=menF PE=3 SV=1
MTDLSQAIARLVESLSTVSPLPKQITLPFQWPERTDPIDWLHTQPLFPKFYWQTRDGTEQVLALGQVKTFSDPASAERQLVKGQRIWGGRSFDGRTERNQRCLQSFFFLPQIEMACREGQWSITLNLCDDLLKVRAALSKLITQSQRLSHPDCDVLATQHQPEFGQWSTMIGDALSAIETTELQKVVLARKTTLELDRTLPAASLLKASVEINKSNFHFLLALDEKHCFVGSTPERLFWRDDSELYTEALAGTIGRGKDAEEDLLLATWLLNDSKNIYENRLVVEDITQRLNPHSEQLDVEVTPHLVRLRNVQHLKRDIEANLVADVPSSTLLDLLQPTAAVAGLPREKAVDFIVENEPFVRGWYSGSVGYLSPEQSEFCVAIRSALIVDNKVHLFAGAGIVPGSVAESEWKELDRKMATLRNLLGPSPDKHMEKKAG

SEQ ID NO: 93960 - protein, 406 aa, Grimontia marina
  misc_feature (1)..(406): tr|A0A128ETM6|A0A128ETM6_9GAMM Isochorismate synthase M enF OS=Grimontia marina OX=646534 GN=menF PE=3 SV=1
MNTDPLDWFHSQPLFPKFYWQTRDGKEQVLALGQVKTFSEPACAESQLAKGQRIWGGRSFDGRTERDQRCLKSFFFLPQIEIVCRDGQWFITLNVCDDLLKIRATLSKLISQSQPLSHPDCEVLATQHQPEFKQWSTMMRNALSSIETTDLQKVVLARKTTLELDRALPAASLLKASLDSNKSNFHFLLALDEKHCFVGSTPERLFWRNGDELYTEALAGTIGRGKDAEEDLSLANWLLNDSKNIYENRLVVDDITQRLIPHSEQLDVEVTPHLVRLRNVQHLKRDIEASLVADVLSSTLLDLLQPTAAVAGLPRERAVDFIVENEPFARGWYSGSVGYLSAEQSEFCVAIRSALVVDNKVHLFAGAGIVPGSVAESEWKELDRKMATLRNLLGPSPEKQLEKKAG

SEQ ID NO: 93961 - protein, 438 aa, Grimontia sp.
  misc_feature (1)..(438): tr|A0A0F6A013|A0A0F6A013_9GAMM Isochorismate synthase M enF OS=Grimontia sp. AD028 OX=1581149 GN=menF PE=3 SV=1
MTNLRQAIDRIVESLLATTPLPPQLSEPFCWSMNTDPLDWFHSQPLFPKFYWQTRDGKEQVLALGQVKTFSDPACAEHQLAKGQRIWGGRSFDGRTERNQRCLKSFFFLPQIEIICRDGQWFITLNVCADLLKVRSALSKLIIQSQRLSHLDCDVLATQHQPEFGQWSTMIGDALSAIETTELQKVVLARKTTLELDRALPAASLLKASVEINKSNFHFLLALDEKHCFVGSTPERLFWRNDSELYTEALAGTIGRGKDAEEDLSLATWLLNDSKNIYENRLVVDDITQRLNPHSEQLDVEVTPHLVRLRNVQHLKRDIEANLIPDVPSSTLLDLLQPTAAVAGLPREKAVDFIVENEPFVRGWYSGSVGYLSPEQSEFCVAIRSALIVDNKVHLFAGAGIVPGSVAESEWKELDRKMATLRNLLGPSPDKHMEKKAG

SEQ ID NO: 93962 - protein, 406 aa, Gryllotalpicola sp.
  misc_feature (1)..(406): tr|A0A387BTG2|A0A387BTG2_9MICO Isochorismate synthase O S=Gryllotalpicola sp. 2DFW10M-5 OX=2419771 GN=D7I44_100 85 PE=4 SV=1
MQALSVETTPLDDVRQLIPFLDARDPLLWQRRGEGIAGIGEAVRLEFAGPTRVTDAAAAWRQMAAAATVSDPLQVPGSGLVAFGTFAFADESEQASVLIVPSVIVGRRAGRSWVTTISTTDASPVAAPKPTPFGPEFRLTMASGALSAAGYGDAVASVISRIAAGDVRKVVLSRELHAHLPAGADVRRALVELALGYSDCWTFAVDGFVGASPETLVRVTAGRVDAQVLAGTAARGANSDTDAVAAAALRSSRKDRAEHAFAVDSVLESLAPHTGALETSEPFTLKLPNLWHLATDVAGPLADGSSALDLVAALHPTAAVAGTPRAAALAVIGELEPFDRGRYAGPVGWIGADGSGEWAVALRSAQIDESGDITAYAGGGIVADSDPVLEVAETTMKFRPIVEAFG

SEQ ID NO: 93963 - protein, 425 aa, Gulosibacter sp.
  misc_feature (1)..(425): tr|A0A1R4FJE8|A0A1R4FJE8_9MICO Menaquinone-specific iso chorismate synthase OS=Gulosibacter sp. 10 OX=1255570 G N=FM112_04445 PE=4 SV=1
MNGIPRLRARTRPIADPGDLLRFADPLSPSAWLRRGDGMVGRGSAWRAEFSGPSRIRDARRAWARIVAEARVEDSIRLPGSGLIAFGAFAFSGSSAAASVLEVPEIVIGRVDGRAFMTEISVARDAADAGPVPTVPVRLPVPLPHGEDARTELEPGVMGRERHREAVASAIARIRAGEFTKVVVSRDQRGRLPEGTDRRHIVRRLAAAYPETWTYAVDGLLGASPEMLVRVIGRSVTARVLAGTLPRGADEAADLAARDALAASEKNRAEHRFAIDSAIDSLRGLDTHEDPETGLTASPEPFLLRLPNVWHLASDIRGTLPEGSSVLDLVEALHPTAAVGGTPRREAVAAIEELEPFDRRRYAGPAGWLSAAGDGEWVVALRGAEVAADGGVTAYAGGGIVDGSDPDEEFAETLPKFRPIADALG

SEQ ID NO: 93964 - protein, 395 aa, Gynuella sunshinyii
  misc_feature (1)..(395): tr|A0A0C5VJJ3|A0A0C5VJJ3_9GAMM Isochorismate synthase O S=Gynuella sunshinyii YC6258 OX=1445510 GN=YC6258_02769 PE=4 SV=1
MDILASSSHLDLAEILANDPTTFLFMSEHRKVRTSGAIAHITARAEGGVDKDSPLQMAVAEAFQRARELGQKNPIVIGAIPFDVSQPSALTVPEWYEFMPHMAVNTNQSVKLEPLTVSEYRYQPNHSDFKNMISEAVQRLKQGQLEKVVLSRILELDLSQAVDCNAILQNLIVQNPAVYQFRIPLGNNNTLIGASPELLVRKQKNSITTNPLAGTCKRMADPQQDHLNAQRLWQSTKDQHEHRLVIDTLRTQLSPLCDQLDIPAQPELIQTSNLWHLSTRIQATLKEPATNALQIACLLHPTPALCGSPAVTAKQLIDELEPHDRGLFSGIVGWCDSEGNGEWAVTIRCGLVQAKRIRLFAGAGIVADSDPESEWQETGAKLGTMLNAFNIHNGE

SEQ ID NO: 93965 - protein, 423 aa, Haemophilus aegyptius
  misc_feature (1)..(423): tr|A0A448MF70|A0A448MF70_HAEAE Isochorismate synthase M enF OS=Haemophilus aegyptius OX=197575 GN=menF PE=3 SV= 1
MSYLAQAIGELKSQIHAYLQQSTNELVRFQVKLDKVDLLAWLKGQSAYPQFYLHFRDEEKALAALGAVQSFSQLNLAQEFIEESGFPLVGGLQFQGTAQFVLPKMLVEQDNKGALVSFFVKNEQSANDTLAHLKTFGNLTALSALPKQIPLHTEPRANERTWCDWVNQALVEIKSGELTKIVLANETTFHLKQAINAYDFLAESEKQNQGCYHFLWAENSHSVFVGSTPERLFAREYNLLLTEALAGTASVSESEEETQSQANWLLNDEKNLKENWLVVKDISQNLRKQVESFDVSNVELKPLRKVQHLIRKIRANLTAHYADVNILKAIHPTAAVSGLPQQQAKMILSEIETFDRGWYAGTLGVMSDVCSEFCVAIRSAFIEGHRIRVFAGAGIVAGSQPLEEWKEIERKAAGLISLFAEEK

SEQ ID NO: 93966 - protein, 425 aa, Haemophilus ducreyi
  misc_feature (1)..(425): tr|Q7VND2|Q7VND2_HAEDU Isochorismate synthase MenF OS=H aemophilus ducreyi (strain 35000HP / ATCC 700724) OX=23 3412 GN=menF PE=3 SV=1
MLIFDQLKQQINNQLGKTTRNLSVIEYQASVDLPPENVALLSWLKAQHQYPHFFWQARDSDLTLATIGSVKIFSSLEEAQTFVDQTHLALVGGIQFEGNCHFLLPRLQLVKNNQRLTAYFYLLEQEISEKMAIFTQTFAEFTHLSQLTLPDNQLLAHQSACDFNHWQHNIEQAISAIQQQQFNKVVLANATTLTFQHPISPYDLLAASQQTNLGCYHFIWAENATHAFLGSSPERLYQRTGNFFKTEALAGTAAVTDNLIQTELNAEWLLTDPKNIYENQLVVDDISMNLADCITQINIYPAEIKRLHNVQHLRRKIRAKLIEKINDANCLARIHPTAAVAGLPRIPAKKFIAENENFTRHWYAGTLGYFHTDHAEFTVTLRSAKIDHNQLTLYAGAGIVAESQADSEWQEIERKSLALARLLKM

SEQ ID NO: 93967 - protein, 436 aa, Haemophilus haemoglobinophilus
  misc_feature (1)..(436): tr|A0A1V4B010|A0A1V4B010_9PAST Isochorismate synthase M enF OS=Haemophilus haemoglobinophilus OX=733 GN=menF PE =3 SV=1
MDNLHEIKTELIRLINQYQPDLKNAFSVLHLDLNVDLNLLGWLKAQTHYPQFYLNFRDSAKKILGLGEIRRFTQVEEAQNFVQEFALSLVGGCQFNGETVFILPRLLLVQEDSLSIQLIIDNRTSWEEEKNSLLNLVQTLDQQIPLMPIHQSIQMMTAKANQSEWCLWVEKALREIEQKNLTKVVLANETRFKTDSPLNAKDFLAESEKYNTGCYHFLFAQEETQTFVGSTPERLYIRQQHCLLTEALAGTAFMTDDENINQQQTQWLLQDPKNIYENKLVADGICQHLSPYVEQITVGEVQIKQLRQVQHLKREISAQLKDGNADALCLKAIHPTAAVAGLPQKAAKAFLQKTETFDRTWYAGTLGIMDKTQSEFCVTIRSAFIEQNDIRVFAGAGIVEGSIPLLEWQEIERKALGLISLLQEEKRSIKYVSQRF

SEQ ID NO: 93968 - protein, 423 aa, Haemophilus haemolyticus
  misc_feature (1)..(423): tr|A0A0M3G8L6|A0A0M3G8L6_HAEHA Isochorismate synthase M enF OS=Haemophilus haemolyticus OX=726 GN=menF PE=3 SV= 1
MSYLAQAIGELKSQIHAYLQQSTNELVCFQVKLDKVDLLAWLKGQSAYPQFYLHFRDEAKVLAALGEDRSFSQLNLAQEFIEESGFPLVGGLQFQGTAQFVLPKMLVEQDEKGALVSFFVKDEQSANDTLVHLKTFENITALSALPKQIPLHTEPRANERTWCDWVNQALVEIKSGELTKIVLANETTFHLKQAINAYDFLAESEKQNQGCYHFLWAENPYSVFVGSTPERLFAREYNLLLTEALAGTASVSESEEETQSQANWLLNDEKNLKENWLVVEDISQNLRKQVESFDVSNVELKVLRKVQHLIRKIRANLTAHYADVNILKAIHPTAAVSGLPQQQAKMILSEIETFDRGWYAGTLGVMSDVCSEFCVAIRSAFIEGHRIRVFAGAGIVAGSQPLEEWKEIERKAAGLISLFAEEK

SEQ ID NO: 93969 - protein, 430 aa, Haemophilus influenzae
  misc_feature (1)..(430): sp|P44613|MENF_HAEIN Isochorismate synthase MenF OS=Hae mophilus influenzae (strain ATCC 51907 / DSM 11121 / KW 20 / Rd) OX=71421 GN=menF PE=3 SV=1
MYLKQNLMSYLAQAIGELKSQIHAYLQQSTNELVRFQVKLDKVDLLAWLKGQSAYPQFYLHFRDEEKALAALGAVQSFSQLNLAQEFIEESGFPLVGGLQFQGTAQFVLPKMLVEQDNKGTLVSFFVKNEQSANDTLAHLKTFENLTALSALPKQIPLHTELRANERTWCDWVNQALVEIKSGELTKIVLANETTFHLKQAINAYDFLAESEKQNQGCYHFLWAENSHSVFVGSTPERLFAREYNLLLTEALAGTASVSESEEETQSQANWLLNDEKNLKENWLVVEDISQNLRKQVESFDVSNVELKPLRKVQHLIRKIRANLTAHYADVNILKAIHPTAAVSGLPQQQAKMILSEIETFDRGWYAGTLGVMSDVCSEFCVAIRSAFIEGHRIRVFAGAGIVAGSQPLEEWKEIERKAAGLISLFAEEK

SEQ ID NO: 93970 - protein, 428 aa, Haemophilus paracuniculus
  misc_feature (1)..(428): tr|A0A1T0AQK3|A0A1T0AQK3_9PAST Isochorismate synthase M enF OS=Haemophilus paracuniculus OX=734 GN=menF PE=3 SV =1
MSIFHQLKQQLSHQIANHRPCSGVVRYQASVPFSAENLTLLRYLKAQSHYPQAFWQSRDQQRSIVAVGAVRTFDSLEQAQQFVDETGFTLVGGVQFEGQSRFILPCLLLEKTSQNLTACFHFDGQQAVSCEPFFAEWQAEFEPLQNQLIQRQTALDFSQWTHNIQQAIAEINQQNLNKVVLANATKLTFAKAINGYDLLAESVRANQGCYHFLWAENEQEMFIGSSPERLYARDQQTLQTEALAGTVAVVDDLATTERNGLWLLSDPKNSHENQLVVDDICQHFADCVNEIQIADVEIKRLHNVQHLRRPIAAKLNQGVNDRDCLRRIHPTAAIAGLPRAAAKQFIAEHEPFKRQWYAGALGFFNPTQAEFCVTLRSGRICQNQITLYAGAGIVAGSEPLSEWQEIERKAQGLSRFLFSQPTNEVKNE

SEQ ID NO: 93971 - protein, 420 aa, Haemophilus parahaemolyticus
  misc_feature (1)..(420): tr|A0A377I399|A0A377I399_HAEPH Isochorismate synthase M enF OS=Haemophilus parahaemolyticus OX=735 GN=menF PE=3 SV=1
MSVFTQLEQQLSEQLSQLQSTQGWIQLTAEVNLSVEESLLLGWLKSQNQHFPHFFFEKRDKNQTIATIGAVKTFSSLEKAQVFVQSTSLLLVGGIQFEGICQFVLPRLMLVKNSQNLTAYLTLNLSEQAVDFTEFFTELNSTSTVKNYQISAPQSSCTFEQWEMNIERAITQIGTGDLRKVVLANAIQLTFENLISAYDLVEQSRAINFGCYHFLWAENAQNAFVGSTPERLYYRKGNQLFTEALAGTVAVSDNPIETEQNAQWLLKDAKNIYENQLVVEDIEEHLNAYVEAFEVHLPEIKRLHNVQHLRRRIEATLKADVLDQDCLRQIHPTAAVAGLPRAKAKQFIAENEPFKRGWYAGTLGIFNPQEAEFCVTLRSAKIEHNQITLYAGAGIIKESEPVSEWQEIERKSQALSKLLG

SEQ ID NO: 93972 - protein, 426 aa, Haemophilus parainfluenzae
  misc_feature (1)..(426): tr|A0A369Z6R9|A0A369Z6R9_HAEPA Isochorismate synthase M enF OS=Haemophilus parainfluenzae OX=729 GN=menF PE=3 S V=1
MGLLEQAKSALIRQFDALATTDPQASIVHLQTKVESDVDLLAWVKGQSVYPQFYLRFRDEAKTVAAVGKVRSFSDVNLAQQFIQEHDFPLVGGLQFQGESQFILPQVLIEQQNGEAVVSVFVETNELASAKTILNLFEKMTALLPLNQLTIESVAPKANQDTWCDWVNQALTRIRQGELTKLVLANETVFRIQGELNGKDFLAVSQAENSGCYHFLWADNARNCFVGSTPERLFARDARQLFTEALAGTAPVSDNPLENDERANWLLNDEKNLNENWLVVEDISQNISHLVEQITVDDVALKPLRKVQHLIRKMQAKLTALCTDADLLKAIHPTAAVSGLPQQQAKKALAEIETFDRSWYAGTLGVMSLNLSEFCVTIRSAFIEENQVRVFAGAGIVEGSQPVEEWLEIERKAAGLISLFAENNGE

SEQ ID NO: 93973 - protein, 420 aa, Haemophilus paraphrohaemolyticus
  misc_feature (1)..(420): tr|A0A369ZR31|A0A369ZR31_9PAST Isochorismate synthase M enF OS=Haemophilus paraphrohaemolyticus OX=736 GN=menF PE=3 SV=1
MSVFTQLKQQLSEQLSQLQLTQEWIQLKADVDLLAEESSLLGWLKSQNQHFPHFFFEKRDENQTIATIGAVETFSSLEEAQAFVQSSSLSLVGGIQFEGLCQFVLPRLILVKNSQKLTAYLTLNISEQAVDFTDFFAEPSRSSLIQNHQILSPQPACTFEQWKANIEQAIIQIKSGDLRKVVLANATQLTFENHISAYDLVEQSREINLGCYHFLWAENAQNAFIGSTPERLYYRKGNQLFTEALAGTVAVSDNPIETEKNAQWLLKDTKNIYENQLVVEDIEAHLNTYVEAFEVHSPEIKRLHNVQHLRRRIEAILKADVLDQDCLRQIHPTAAIAGLPRAKATQFIAKNEPFKRGWYAGTLGIFNPQEAEFCVTLRSAKIEHNQITLYAGAGIVKESEPVSEWQEIERKSQALAKLLS

SEQ ID NO: 93974 - protein, 424 aa, Haemophilus parasuis
  misc_feature (1)..(424): tr|A0A084F0Z3|A0A084F0Z3_HAEPR Isochorismate synthase M enF OS=Haemophilus parasuis OX=738 GN=menF PE=3 SV=1
MSVFSQLKQQLYQQLQQKPVAQGLVQLQAEIAIDLENQQLLAWLKAQPLFPHYYWQNRDTEQTIVAVGAVQTFEHLDDVEQFSKQSDLMVVGGIEFEGQCHFVLPRLLLVKNEKNITAWLNLDGRHFESEQKECIALLAQFEQTAELHPIENSLLSTKVACDFSRWQHNIELAIEQIQQQQMNKVVLANATTKTFTHLISPYVLLFASQQKNLGCYHFLWSEKQGEAFIGSTPERLYLRQQRQFFTEALAGTVAVTDDPVQTEQNALWLLNDQKNIYENWLVVDDICSHLADCATDIQVSDAEIKRLHNVQHLRRKIQTQLTEQVSDADCLARIHPTAAVAGLPRPKAKQFIQQQECFERGWYAGALGYFTPEQAEFCVMLRSALIQANQITFYAGAGIVEKSDPQSEWQEIDRKARAMVGLME

SEQ ID NO: 93975 - protein, 426 aa, Haemophilus pittmaniae
  misc_feature (1)..(426): tr|F9Q7Z3|F9Q7Z3_9PAST Isochorismate synthase MenF OS=H aemophilus pittmaniae HK 85 OX=1035188 GN=menF PE=3 SV= 1
MDSLAYAAQSLAQQLREVSPKQGEIVCLCVTLKASLDGLQWLKAQHEYPQFYLTLRDCEKSYAAIGALRQFDSLDGAQNFIENTNFPLVGGLTFVGSAQFILPRILLEQSGETCQVSLFVEGNHSHEALAALEGLAQSQSLVPVAKVCVRQKRFRASPARWENWINQALDSIAEGKMSKLVLANETTFELESSLNPYDFLAESRQLNKGCYHFLWRQTADSTFLGSTPERLFARDGLQLHTEALAGTAPIGEDANAQQRWAQWLLNDDKNRLENELVVQDIAHNLQAWLATWQVADVAIKPLRTVQHLVRKISAELISSCRDADILALIHPTAAVAGLPQQAAKQRLQEIETFERDWYAGTLGLMSREQAEFCVTIRSAFIEQQQIRVFAGAGIVAGSDPLAEWKEIERKAAGLISLFATDNGEEK

SEQ ID NO: 93976 - protein, 427 aa, Haemophilus somnus
  misc_feature (1)..(427): tr|Q0I315|Q0I315_HAES1 Isochorismate synthase MenF OS=H aemophilus somnus (strain 129Pt) OX=205914 GN=menF PE=3 SV=1
MDNLHEIKAEFIRLINQYQFDPKNDFSVLRLDLNEELNLLGWLKAQHHYPQFYLNFRDTNKKILGLGEICRFTQVKSAQTFVQQFNLPLIGGCQFNGEPLFILPRLSFIQEQKLVIQLIIDNKKPWEQEKYELLNIIHSLEKQVQLNPIHQSIQLITTKANQTEWCLWVEKALHEIKQKNLTKVVLANETDFKTDSPLNAKDFLAESEKYNTGCYHFLFAQNNTQAFIGSTPERLYVRKQNRLITEALAGTAFITNDEHINQQQAQWLLQDPKNIYENSLVVEGICQHLIPYVEEITVSELEIKQLRQVQHLKREISARLKAGNTDAVCLNAIHPTAAIAGLPQKEAKVFLQNTETFDRTWYAGALGIMTETESEFCVTIRSSFIEQDYIRIFAGAGIVEGSIPLLEWQEIERKALGLISLLQKETE

SEQ ID NO: 93977 - protein, 423 aa, Haemophilus sp.
  misc_feature (1)..(423): tr|H1LLP4|H1LLP4_9PAST Isochorismate synthase MenF OS=H aemophilus sp. oral taxon 851 str. F0397 OX=762965 GN=m enF PE=3 SV=1
MSYLAQAIGELKSQIHAYLQQSTNELVRFQVKLDKVDLLAWLKGQSAYPQFYLHFRDEAKALAAIGEVRSFSQLNLAQEFIEESGFPLVGGLKFQGTAQFVLPKILVEQDEKGALVSFFVKDEQSANDTLAHLKTFENITALSALPKQIPLHTGPRANERTWCDWVNQALVEIKSGELTKIVLANETTFHLKQAINAYDFLAESEKQNQGCYHFLWAENPHSVFVGSTPERLFVREYNLLLTEALAGTASVSESEEETQSQANWLLNDEKNLKENWLVVEDISQNLRNQVESFDVSNVELKPLRKVQHLIRKIRANLTAHYADVNILKAIHPTAAVSGLPQQQAKIILSEIETFDRGWYAGTLGVMSDECSEFCVAIRSAFIEGHRIRVFAGAGIVAGSQPLEEWKEIERKAAGLISLFAEEK

SEQ ID NO: 93978 - protein, 426 aa, Haemophilus sputorum
  misc_feature (1)..(426): tr|J4KC62|J4KC62_9PAST Isochorismate synthase MenF OS=H aemophilus sputorum HK 2154 OX=1078483 GN=menF PE=3 SV= 1
MSILTQLKQQLCEQMAQLHANQGVVALTAEWQLTDADFSLLGWLKAQSHSFPHYFLQHRDAPQTLIGMGQMIYFDDKALAQQFVSQTGFTLLGRVAFEGKACFILPRLMGELQAAKLRFTLYIDSDQLASEQRQLALFFANFEKIEPLVFAPNTLLNRQEAISEDAWQAHVEQATHAINAHQFSKVVLANAYTLSFAHPISPYDLLQESLKTNLGCYQFLWAENSEQAFLGATPERLYAREGNQLFTEALAGTVAASSENTQTEANAAWLLNDTKNQIENQLVVEDIAIHLADEVDDFQVGQAEIKRLNHVQHLRRPIRTTLKTGVSDMRCLSRLHPTAAIAGLPRLAAKQFIAQTEPFKRNWYAGALGFVSPERSEFCVTLRSAQVHGNKLIVYAGAGIVAGSEPQAEWQEIARKSQAMIKLFHT

SEQ ID NO: 93979 - protein, 441 aa, Hafnia alvei
  misc_feature (1)..(441): tr|A0A377P2V9|A0A377P2V9_HAFAL Isochorismate synthase M enF OS=Hafnia alvei OX=569 GN=menF PE=3 SV=1
MVHLSVLVERIIPLLRQAAAEQSGLVRIALPCSLKDGTQMLEWLASQPLFPQFYWRHRDGAEEAAVCGAVRTFTDAEQAQKFVQENGCPELRIWGLNAFGQVELDGYGTINSLLFLPRIGLMRHAGKAELVVYLYGETSLTQDLELALRDLAALCAIQPLPTLQTDVLAARHQPDHDAWCNLLNNALAEIEHKAFEKVVLARRTTLKLSLPLRAAQFLAASRAVNHRCYHFMLALAPERAFLGSSPERLYRRQNLSLETEALAGTVASGNNDAQAQENAQWLMSDRKNQHENLLVVDDICQRLQGGAQALDVMPAEVIRLRKVQHLRRPIHATLVQSNDADCLRRLQPTAAVAGLPREPARQFIMQDEPFDRGWYAGSAGYLSQDQAEFAVALRSALIENDHIHLYAGAGIVAGSDPEQEWLEIENKAAGLRTLLESDISL

SEQ ID NO: 93980 - protein, 440 aa, Hafnia paralvei
  misc_feature (1)..(440): tr|A0A2A2ME63|A0A2A2ME63_9GAMM Isochorismate synthase M enF OS=Hafnia paralvei OX=546367 GN=menF PE=3 SV=1
MVHLSALVERIIPLLRQAAAEQSGLVRVALPCSLKDGTQMLEWLASQPLFPQFYWRHRDGAEEAAVCGAVCTFTDAEQAQEFIRKNDCPELRIWGLNAFGQVELDGYGTINSLLFLPRIALMRHAGKAELVVYLYGETSLQQDLDIALHDLADLCQIQPLPPLQTVVLAAHHQPEHDAWCNLLNHALVEIEHKAFEKVVLARRTTLKLSQPLRAAQFLSASRAVNHRCYHFMLALAPERAFLGSSPERLYRRQQLSLETEALAGTVASGSSDAQAQENAQWLMSDRKNQHENLLVVDDICQRLQGGAQALDVMPAEVIRLRKVQHLRRPIHATLIHDNDADCLRRLQPTAAVAGLPREPARQFIMRDEPFDRGWYAGSAGYLALEQAEFAVALRSALIQGDHIHLYAGAGIVAGSDPEQEWLEIENKAAGLRTLLETEFS

SEQ ID NO: 93981 - protein, 469 aa, Halalkalibacillus sp.
  misc_feature (1)..(469): tr|A0A2I0QUV8|A0A2I0QUV8_9BACI Isochorismate synthase M enF OS=Halalkalibacillus sp. B3227 OX=2018042 GN=menF P E=3 SV=1
MEGQLMLQTQQNSIDKQLKELQNQMIDDNKEYSVSVVEQIEPIDPVDFFAKFESFQGQRMLWKSADDEYAYVGIGVQKAFQDKHEQGRFESIQSQWKEFLENTLISSDITQKGTGPTLLGGFSFLEKSISSDIWAAFPSSYMQLPKVMLTNYNGNSYLSYNVTLSQQSDIKNVSDQLAKWKRPIVHHSSSAESNRLLSKSSSPYQDWEALINDAVSQIKNGEMGKVVLARQLEADFEHKITTLEVLNRLYKQQKDSYIFAVENGEDTFIGASPEQLVNVEGQRLSSACLAGTTSRGNTIESDEQLASELFYDEKNRQEHHYVVEMMREAISPLCENVEIPDDPTIYPLRALQHLYTPVQAQLKQDYNVLDVVKHLHPTPALGGEPREKALEFIEKNEQLDRGWYAAPVGWMNHHWDGEFAVGIRSGLIRNHKAILFAGCGIVEDSDPEAEFNETELKLKPMLEALGGTS

SEQ ID NO: 93982 - protein, 455 aa, Halanaeroarchaeum sulfurireducens
  misc_feature (1)..(455): tr|A0A0N9N9Z2|A0A0N9N9Z2_9EURY Isochorismate synthase O S=Halanaeroarchaeum sulfurireducens OX=1604004 GN=menF PE=4 SV=1
MASRDGQDRVQTAGRLVSRSVSIPPTALRDVLRLDRPIHAAVTAPDGPTVVASGSAATATAEGADRFAGIRETATTVYETVDDDSVPDGARPRFVGGFAFHDRHERAHPWDDFPGAWFALPSVQIVLGEDGGWITATGNRDERSPSEIVATAESVRDGLVSGGPAEETPGVSSVVRETTLEEWTEQLEGALSRIDAGDIEKVALAQTLRANLEAQFPLASVIERLGETYPDCFLFALRPGAGYTEPTHSGEQAPPVPTFFGASPERLVTKAGDTVRTGALASTVGRGDTETEDDRLADRLRTDEKFQREHRVVVESIREQLTPVARNVQTGSRTVRRLDSVQHLYTPIEATATADHVLAVVTALHPTPAVGGLPPDVALETIRNTETFDRGWYAAPVGWFDEEGDGTFAVGIRSAVGEDREATLFAGNGIVADSDPVAEWEEVQLKYEPILDALR

SEQ ID NO: 93983 - protein, 448 aa, Halapricum salinum
  misc_feature (1)..(448): tr|A0A4D6HGL3|A0A4D6HGL3_9EURY Isochorismate synthase O S=Halapricum salinum OX=1457250 GN=DV733_13845 PE=4 SV= 1
METLRGDEAVGTASDLTVVARSHELDDVDHAALLAEVSRPSVVWRDGEEAVVTTGATASITANGPDRFATVRETATALFDRLRTPATPQPARPRLFGGFAFHDGAADRGPSTWDGFPDAWFVLPTVQVTTSGDRCWLTVTATGPDADRQATDRLERWRERLSDLPTHEPTGRPGIVDQHRTPSREDWREQVEDAVADIRSGTLRKVVLAQSLSVGLERPLSIPDALSRLDTRYPDCVRFAVTTESEAAGTLFGATPEKLVSLSGRTVQTEALAGSTGRGETPAEDEWLGEELLDSDKDNHEHDLVVEAIRDQLDPVASSVQTGDRILRRLATVQHLQTPIRATLESDRHVLDLVEALHPTPAVGGLPPDAALETIKSTEAFDRGWYAAPVGWMDAAGNGTFAVAIRSALARERTASLFAGAGIVHDSDPDREWDEVQLKYRPMLDELE

SEQ ID NO: 93984 - protein, 455 aa, Halarchaeum sp.
  misc_feature (1)..(455): tr|A0A3M9JT33|A0A3M9JT33_9EURY Isochorismate synthase O S=Halarchaeum sp. CBA1220 OX=1853682 GN=EFA46_08255 PE= 4 SV=1
MDQREGVARADTAGLVSRTVRLPDASLSGLLRTLGKPNAVWTAPGEPTVTGYGAAAQVTAEGPARFAAVRERAGAVFESVDRPADAPAVARPRFLGGFAFHDGHSATAHWAGFPTAAFVLPHVQVVTTPEATWLTVNAQGERASVERVEATITSVRERFDPEEHAADPPPGVVSTARTTSRAEWRRQVEAATARIRAGDLEKVVLAQALDVTLDAAFSLPDALERLGETYPECFRFAFRPTDGATFFGASPERLVTRDGRELRTGALAATVGRGETPDDDQQLEADLRSSAKYRHEHEVVAERIREQLRGVASDVATGERSVRKLATVQHLFTPITGETDEHVLSLAEALHPTPAVGGLPPDAALDVIRETETFDRGWYAAPVGWFDGSGDGTFAVALRSALARGEHVRPFAGAGIVADSDPDAEWAEVQLKYRPILDVFERAGDATPDAGGGDR

SEQ ID NO: 93985 - protein, 445 aa, Haloarcula hispanica
  misc_feature (1)..(445): tr|G0HRA0|G0HRA0_HALHT Menaquinone-specific isochorisma te synthase OS=Haloarcula hispanica (strain ATCC 33960 / DSM 4426 / JCM 8911 / NBRC 102182 / NCIMB 2187 / VKM B-1755) OX=634497 GN=menF PE=4 SV=1
MEPLRGDETTVGETTVVARGCRLDDAPVRAVLETDARPRFFWAAGTESIAARGSAATVTADGQSRFDDVRTAVEALFADCSVPDDLPSVARPRAFGGFAFHNGTHEGEDSPWDGFPSAAFFLPEIQVTRRDDDAWLTTVATGPEAATEAETLLEEWRDRLVADSERNPGTPPGISHRKRTPTQDGWREQVAAATESIDRGELQKVVLAQSLSATLDAELSVPDVMARLSKTYPDCYRFMLSPDSGGTFFGATPERLVSVRGRTVRTEALAGSTGRGDTPAEDEWLAAELLDSEKDRHEQKLVADAIRDQLKPFASTVRIGDRTVRRLATVQHLRTSITAELDDDEHVLSLVEALHPTPAVGGLPPDAALRTIRETEAFDRGWYAAPIGWVDAAGNGTFAVGIRSAVATEREATLFAGAGIVADSDPDREWDEVQLKYRPILDELE

SEQ ID NO: 93986 - protein, 445 aa, Haloarcula marismortui
  misc_feature (1)..(445): tr|Q5V3T3|Q5V3T3_HALMA Isochorismate synthase OS=Haloar cula marismortui (strain ATCC 43049 / DSM 3752 / JCM 89 66 / VKM B-1809) OX=272569 GN=menF PE=4 SV=1
MEPLRGDETTVGETTVVARGCRLDDAPVRSVLVTDARPRFFWAAGTESIAARGSAATVTADGQSRFDDVRTAVEALFDDCSVPDSLPSIARPRAFGGFAFHNGTHEGEDSPWDGFPSAAFFLPEIQVTRRDDDAWLTTVATGPEAATEAEALLEEWRDRLVADSERNPGTPPGISHRKRTPTQDGWREQVAAATESIDRGELQKVVLAQSLSATLDAELSVPDVMARLSKTYPDCYRFMLSPDSGGTFFGATPERLVSVRGRTVRTEALAGSTGRGDTPAEDEWLAAELLDSEKDRHEQKLVADAIRDQLEPFASTVRIGDRTVRRLATVQHLRTSITAELDDDEHVLSLVEALHPTPAVGGLPPDAALRTIRETEAFDRGWYAAPVGWVDAAGNGTFAVGIRSAVATEREATLFAGAGIVADSDPDREWDEVQLKYRPILDELE

SEQ ID NO: 93987 - protein, 445 aa, Haloarcula sp.
  misc_feature (1)..(445): tr|A0A421E8I7|A0A421E8I7_9EURY Isochorismate synthase O S=Haloarcula sp. Atlit-47R OX=2282132 GN=DVK00_15165 PE =4 SV=1
MEPLRGDGTTVGETTVVARGCRLDDAPVRAVLETDARPRFFWAAGTESIAARGSAATVTADGQSRFDDVRTALEALFDDCSVPDSLPSIARPRAFGGFAFHNGTHEGEDSPWDGFPSAAFFLPEIQVTRRDDDAWLTAIATGPEAATEAETLLGEWRDRLATDTEREPGTPPGISHRKRTPTQDGWREQVSAAIASVDCGDLQKVVLAQSLRVALETDLSVPDVMARLSRTYPDCYRFMLSPEAGGTFFGATPERLVSVRGRTVRTEALAGSTGRGDTPAEDEWLAAELLDSEKDRHEQKLVADAIRDQLEPFASTVRIGDRTVRRLATVQHLRTSITAELDDDEHVLSLVEALHPTPAVGGLPPDAALRTIRETEAFDRGWYAAPIGWVDAAGNGTFAVGIRSAVATEQKTTLFAGAGIVADSDPDREWDEVQLKYRPILDELE

SEQ ID NO: 93988 - protein, 467 aa, Halobacillus aidingensis
  misc_feature (1)..(467): tr|A0A1H0VG57|A0A1H0VG57_HALAD Isochorismate synthase M enF OS=Halobacillus aidingensis OX=240303 GN=menF PE=3 SV=1
MLHTKAPHIEEMVGEALQKAHHLGEPLFISIVEHIDDQNPFQFFETGQHIDQHRSFWQSAENDLTMVGIGKASQLYAKSKQRFREVQSLWKHLQENAMLHDDYNKKGTGMVALGGFSFDPEQKEDTPWESFPDSKMTIPAFLLTKVDGETYLTINALIFPEDHQQQIAHQIQDHRDLLLNEGEVSGSLPVIDQTFEVAPEAWKESVKKATDDITAGLMEKVVLARELRVTFKEDVQIAAVLKALADTQPNSYIFCYESEGDHFIGATPERLAKVEDRELVSTCLAGTIPRGRTEQEDLKLGEELLGDPKNLQEHQFVVEMIKEAVEACSSQVEVPNGPVLYPLRNLQHLYTPVRAVLDQGYTLLDVIEKLHPTPALGGMPQRVSVEYIRTHETLNRGWYAGPIGWFDAQDNGEFAVAIRSALIQQKEASLFAGCGVVEDSDPEAEYAETAVKLKPMMNVLGGSEWDM

SEQ ID NO: 93989 - protein, 463 aa, Halobacillus alkaliphilus
  misc_feature (1)..(463): tr|A0A1I2NHQ5|A0A1I2NHQ5_9BACI Isochorismate synthase M enF OS=Halobacillus alkaliphilus OX=396056 GN=menF PE=3 SV=1
MLHTQAPQIDEIIEKAINQAQERNEPQLISVVDQIEPSDPFQFLDAGTSINNHCLFWRSAEEDFTMVAVGTAYKMYAENKNRFKEIQVMWDNIHQSASTYDEFNEKGTGIVALGGFSFDSKQNEQVPWEAFPDSQMTIPAFLLTNKGPESYLTTNVLIFPEDHKQQIITQLSNHRETLLKAGHQTFELPVRKDSEEIDPSGWKKSIEQATEDIKKGLLDKVVLARELRISFNDPVQLAAVIEALAATQPNSYIFAFESEGEYFVGATPERLAKLDKQQLVSTCLAGTTRRGKTKEEDVQLGEELLYDPKNRQEHQFVVEMIRQAVEACCYNVQIPEAPVLYPLKNLQHLYTPVTAVLEKGYTLLDVIEKLHPTPALGGMPQKKSVDYIRTNEKLNRGWYAGPIGWFDMHNNGEFAVAIRSALIKSDKASLFAGCGVVEDSDPDAEYEETHVKLKPMLSVLGGC

SEQ ID NO: 93990 - protein, 463 aa, Halobacillus dabanensis
  misc_feature (1)..(463): tr|A0A1I3QYY8|A0A1I3QYY8_HALDA Isochorismate synthase M enF OS=Halobacillus dabanensis OX=240302 GN=menF PE=3 S V=1
MLHTKTPIIEEWIGEALQKAHHLGEPLFISIVEQIDNQDPFQFFDAGKDIDQHRTFWQSADSDFTIVGVGKASQLYAKSTHRFQEVQSLWNQLQENAMVHDEYNIKGTGMVAIGGFSFDPEQQDQSPWGSFLDTQMTVPAYLMTQVNGESYLTINALIFPEDHLQQISNQVLSHREMLLRQQDSTTHLPSIKEAYEIAPNDWKNSVKQATEDIKAGLIEKVVLARELRVSFEEDAHIASILKTLADTQQNSYIFAYESDGDYFVGATPERLAKLEERELVSTCLAGTIPRGRTEEEDQLFGQELMNDPKNRQEHQFVVEMIREAVEACSSHVSIPEAPVLYPLKNLQHLYTPVRAKLDEGYTLLDVIEKLHPTPALGGMPQKESVEYIRIHETLNRGWYAGPIGWFDAGNNGEFAVAIRSALIQKDEASLFAGCGVVEDSDPEAEYEETSVKLKPMLSVLGGS

SEQ ID NO: 93991 - protein, 467 aa, Halobacillus faecis
  misc_feature (1)..(467): tr|A0A511WTI2|A0A511WTI2_9BACI Isochorismate synthase M enF OS=Halobacillus faecis OX=360184 GN=menF PE=3 SV=1
MLHTKAPQIEEVVGEALQKAHHLGEPLFISIVEHIDDQDPFQFFETGQHIDQHRSFWQSAENDLTMVGIGKASQLYAKSKQRFREVQSLWTQLQENAMVHDDYNKKGTGMVALGGFSFDPEQKEDTPWESFPDSQLTIPAFLLTKVEGETYLTINALIFPEDHQQQIANQIQNHRDSLLKKGEVTGSLPVIEQTFEVAPEAWKESVKKATEDITAGLMEKVVLARELRITFKENVQITAVLKALADTQPNSYIFCYESEGDHFIGATPERLAKVEERELVSTCLAGTVPRGRTEEEDFKLGEELLGDPKNRQEHQFVVEMIKEAVEACSSQVEVPNGPVLYPLRNLQHLYTPVKAVLDQGYTLLDVIEKLHPTPALGGMPQQVSVEYIRTHETLNRGWYAGPIGWFDAQDNGEFAVAIRSALIQQKEASLFAGCGVVEDSDPEAEFAETAVKLKPMMNVLGGSEWDM

SEQ ID NO: 93992 - protein, 463 aa, Halobacillus halophilus
  misc_feature (1)..(463): tr|I0JPY7|I0JPY7_HALH3 Isochorismate synthase MenF OS=H alobacillus halophilus (strain ATCC 35676 / DSM 2266 / JCM 20832 / NBRC 102448/ NCIMB 2269) OX=866895 GN=menF PE=3 SV=1
MLHTQAPQINEIIEKAINQAQERNEPQLISVVDQIEPSDPFQFLDAGTSINNHCLFWRSAEEDFTMVAVGSAYKMYAENENRFKEIQVMWDNIHQSALTYDEFNEKGTGIVALGGFSFDSKQNDQVPWEAFPDSQMTIPAFLLTNKGPESYLTTNVLIFPEDHKQQIITQLSNHRETLLRAGHKTFELPVRTNSEEIDPSGWKKSIEQATEDIKKGLLDKVVLARELRISFNDPVQLAAVIEALAATQPNSYIFAFESEGEYFVGATPERLAKLDKQHLVSTCLAGTIRRGKTKEEDVQLGEELLYDPKNRQEHQFVVEMIRQAVEACCYNVQIPKAPVLYPLKNLQHLFTPVTAVLEKGYTLLDVIEKLHPTPALGGMPQKKSVDYIRTNEKLNRGWYAGPVGWFDMHNNGEFAVAIRSALIKSDRASLFAGCGVVEDSDPDAEYEETDVKLKPMLSVLGGC

SEQ ID NO: 93993 - protein, 467 aa, Halobacillus karajensis
  misc_feature (1)..(467): tr|A0A024P9C8|A0A024P9C8_9BACI Isochorismate synthase M enF OS=Halobacillus karajensis OX=195088 GN=dhbC PE=3 S V=1
MLHTKAPQLEEMIGEALQKAHHLGEPLFISIVEHIDDQDPYQFFEAGLDIDQHRSFWQSAENDLTMVGVGKASQLYAKSRQRFREVQSLWGELQEKAFVHDNYNQKGTGMVALGGFSFDPEKQEKTPWDNFSDSQMTIPAFLLTKVDGQSYLTINAMIFPEDHYQQIITQIKDHKHRLLHQGEWTHSLPFIDQLYEMVPEAWKRSVKQATEDIKAGLMEKVVLAREVRLTFKGDAHITSVLKALAQTQPNSYIFCYESEGSHFIGATPERLAKLDDRELVSTCLAGTIPRGLSEEEDQKLGEELLNDPKNRQEHQFVVEMIKEAVEACSRKVEVPDGPVLYPLRNLQHLYTPVKAVLDEGYTLLDVIAKLHPTPALGGLPQKVAVDYIRTHETLNRGWYAGPIGWFDAQDNGEFAVAIRSALIQKDEASLFAGCGVVEDSDPEAEYEETAVKLKPMMSVLGGSEWDM

SEQ ID NO: 93994 - protein, 463 aa, Halobacillus litoralis
  misc_feature (1)..(463): tr|A0A410MGL8|A0A410MGL8_9BACI Isochorismate synthase M enF OS=Halobacillus litoralis OX=45668 GN=menF PE=3 SV= 1
MLHTKAPHIEELIGEALQKAHHIGEPLFISIVERIDAQDPFQFFEAGSAVDTHRSFWQSADNDFTMVGVGKGSQLYAKSEQRFQEVQSLWNELQENAIIHDDYNKKGTGMVALGGFSFDPLEAETTPWESFPDSQLTIPAYLLTNVDEESYLTINAVIFPEDHPQQIANQILSQRELLFEAEMKAVQLPEIKKTVEISPEDWKVSVRKATEDIKAGMIEKVVLARELRLSFHEDTHITSILRTLAETQSNSYVFAFESNGDHFIGATPERLAKVDERKLVSTCLAGTTPRGKSEEEDMLLGQELLADPKNRQEHQFVVEMIREAVEACSSQIEIPEAPILYPLKNLQHLYTPVKAILDQGYTLLDVIEKLHPTPALGGMPQKKSVSYIREHETLNRGWYAGPVGWFDIRNNGEFAVAIRSALIQQDEASLFAGCGVVEDSDPEAEYEETAVKLQPMRSVLGGF

SEQ ID NO: 93995 - protein, 463 aa, Halobacillus mangrovi
  misc_feature (1)..(463): tr|A0A1W5ZTX5|A0A1W5ZTX5_9BACI Isochorismate synthase M enF OS=Halobacillus mangrovi OX=402384 GN=menF PE=3 SV= 1
MLHTKTSHIEEIIGEAIEKARHYTEPQLISVVDQIDYIDAYQFMDHGQVVDYHRLFWRSAEEDFTMVGVGTASKLFATSERRFKEVQSLWNEIREHAVIYNRYGEKGTGVVAIGGFSFDSKQKNASPWEAFPDSQMTIPAYLLTNKSGKSFLTTNVMIFPEDHQQQIVNQIADHHEKLLSLTDHDFQLPERTNTSEVAPELWKASVKEATDDIKKGLLEKVVLARELRISFSEPVQIAGVLKALAESQDNSYIFGFESEGDYFVGATPERLAKVDKRELISTCLAGTVPRGGTEEEDQHLGRDLLHDPKNRQEHQFVVEMIKEAVEACATNVDIPEEPVLYPLKNLQHLYTPVRATLDEGYTILDVIEKLHPTPALGGLPQQSSVEYIRHHETLNRGWYAGPIGWFDDHNNGEFAVAIRSALIQNDSASLFAGCGVVEDSDPQAEYEETAVKLKPMLSVLGGY

SEQ ID NO: 93996 - protein, 463 aa, Halobacillus salinus
  misc_feature (1)..(463): tr|A0A4Z0GZD8|A0A4Z0GZD8_9BACI Isochorismate synthase M enF OS=Halobacillus salinus OX=192814 GN=menF PE=3 SV=1
MLHTRVPHIEEIIGEAIKKAKQSDQPQLVSVVDRIDYTDPYSFLYAGQGIDQHRLFWKSAEEPFTLVGVGAVTRMTSTDQNRFTQLQAEWNSLIDGAITYDEFGQKGTGIVSMGGFSFDPEEKNERPWESFEESRLTVPAFLLTNHGYQSYLTSNFMIYPEDHQKQIIREWKDNWDELLDTQDFQFQLPVRSGEKEIDPEEWKESVLQATVDIKRGVLEKVVLARELQVKFEQPVQLEAVLKALAETQTNSYIFSFESNGEHFIGATPERLAKLEQQQLISTCLAGTIPRGHTEEEDRKLGQELLYDPKNRQEHQFVVEMIKEAVEACSHDVQIPKAPVIYPLRNLQHLYTPVSATLDPGYTLLDVIERLHPTPALGGLPQKKSVEYIREYESLNRGWYAGPVGWMDDRNNGEFAVAIRSALLQGDKASLFAGCGVVEDSDPIAEYEETAVKLQPMLSVLGGC

SEQ ID NO: 93997 - protein, 463 aa, Halobacillus sp.
  misc_feature (1)..(463): tr|A0A0B0CY40|A0A0B0CY40_9BACI Isochorismate synthase M enF OS=Halobacillus sp. BBL2006 OX=1543706 GN=menF PE=3 SV=1
MLHTKTSQIEEIIGEAIAKARQYKEPQLISVVDQIDYNDPYQFMDNGQAVDDHRLFWKSAEEDFTLVGIGTASKLFATNERRFREVQSLWNEIREHAVIYNRYGEKGTGIVALGGFSFDPQQGESSPWEAFPDSQMTIPAYLLTNKNGQSFLTTNVLIFPEDHQQQIVNQIADHREKILNYSQRDLRLPERTKAVEVSPEEWKRSVKAATDDIKKDLLEKVVLARELRVSFQEPVQIAAVIQALAETQDNSYIFAFESEGEYFVGATPERLAKVEKRELVSTCLAGTVPRGRTEAEDHHLGQGLLNDPKNRSEHQFVVEMIRGAVEACSTNVHIPGEPVLYPLRNLQHLYTPVRATLDEGYTILDVIERLHPTPALGGMPQKESVEYIRHHETLNRGWYAGPIGWFDDHNNGEFAVAIRSALIQHDSASLFAGCGVVEDSDPEAEYEETAVKLKPMLSVLGGC

SEQ ID NO: 93998 - protein, 467 aa, Halobacillus trueperi
  misc_feature (1)..(467): tr|A0A3D8VRK2|A0A3D8VRK2_9BACI Isochorismate synthase M enF OS=Halobacillus trueperi OX=156205 GN=menF PE=3 SV= 1
MLHTKAPHIEEMVGEALQKAHHLGEPLFISIVEHIDDQNPFQFFETGQHIDQHRSFWQSAENDLTMVGIGKASQLYAKSKQRFREVQSLWKHLQENAMLHDDYNKKGTGMVALGGFSFDPEQKEDTPWESFPDSKMTIPAFLLTKVDGETYLTINALIFPEDHQQQIAHQIQDHRDLLLNEGEMSGSLPVIDQTFEVAPEAWKESVKKATDDITAGLMEKVVLARELRVTFKEDVQIAAVLKALADTQPNSYIFCYESEGDHFIGATPERLAKVEDRELVSTCLAGTIPRGRTEQEDLKLGEELLGDPKNLQEHQFVVEMIKEAVEACSSQVEVPNGPVLYPLRNLQHLYTPVRAVLDQGYTLLDVIEKLHPTPALGGMPQRVSVEYIRTHETLNRGWYAGPIGWFDAQDNGEFAVAIRSALIQQKEASLFAGCGVVEDSDPEAEYAETAVKLKPMMNVLGGSEWDM

SEQ ID NO: 93999 - protein, 448 aa, Halobacteriovorax marinus
  misc_feature (1)..(448): tr|E1X1B2|E1X1B2_HALMS Putative menaquinone-specific is ochorismate synthase OS=Halobacteriovorax marinus (stra in ATCC BAA-682 / DSM 15412 / SJ) OX=862908 GN=menF PE= 4 SV=1
MINLLELKHSVIRQLSEHWKQVDFDNLSKDKKRFVTYKFKIEKTKLSNLLGHVIHRPLNYFKSKDNSKEILGIGSHITYTKKYDYNKLLGLIESDNDLVFLGAQRFDSNTKRDDAWSGFDECHFTLPKIIFETTPESTVLKVVFNKKSISTEDKRSNALFELEAYLNFIRHEFTVTKPREVATYPSKDQWSNMVDYCLNTLSTTPLEKVVIARKEIVEFDRLADPMAIFEKNMKNANDSYLMYLDPGDGKVFMSFTPEKLFKLNNREISLDCLAGTRPRSNDFEADLKFQSELMSSAKELNEHRIVTREIQEKLSNLGADVRVENKESILKLKFIQHLHTHINATLPERSNFAVLLNTFHPTPAVGGRPWEMAKKCIEQAEPFDRGLYAGPMGYISAESCEFAVAIRSALTEETKLHLFGGCGLVTGSEAESEWVETQNKMKNFEITL

SEQ ID NO: 94000 - protein, 457 aa, Halobacteriovorax sp.
  misc_feature (1)..(457): tr|A0A4Z0KV47|A0A4Z0KV47_9PROT Isochorismate synthase O S=Halobacteriovorax sp. Y22 OX=2505978 GN=EP118_07810 P E=4 SV=1
MRLAANNLQIDIINQLIKLDPNDERLVKGPIYTLFKLEAGFNNISSIIDLFQTYRKFYFLNKDKDCEFLALGSWQDFNSLYHYEDIENLTREHDFLKICGAQRFKSEPDCLEWHGLEDCSYFVPKVIIDGGNQGVDIKIILPNSYFEDDNAKKEALHKLAISLEPNPKHMHSEYNYITKSISATSKTQWGKMVNEAVSKIKEQDLKKVVLSRKLKFTFKHPICAYEQFKTLKENNTNNSYNILFQFSANQCFYSVTPETLFKMQGRNVYIDSLAGTIKRGKNKQEDEFLEKTLLSNEKELEEHRHVSSYIEGALKKLTKDLHITKKEEILKLKYIQHIHSKYEGVLSDDAKASDIITGLHPTPAVAGLPKKESIEQIDQLEKSSRGLYAAPIGFFSKEKTEFAVGLRCALADKQDLHIYAGCGIVKDSSPEKEWNETTNKMRNFTEVIKAKSWTNFQ

SEQ ID NO: 94001 - protein, 442 aa, Halobacterium hubeiense
  misc_feature (1)..(442): tr|A0A0U5H3T5|A0A0U5H3T5_9EURY Isochorismate synthase O S=Halobacterium hubeiense OX=1407499 GN=menF PE=4 SV=1
MSSLSGEAAARGAVVSRSCRVADVSYRAFLAARDAPRIHWADPDGLELSGVGDAATVTASGADRFEAVREWATALFDDTDHDGPEVARPRLLGGFAFRDDHAPEGTWSGFPAAQFVLPAVQLASAGDETWLTVTRAGEDVDPKAVEATLADAREEIEALPAMQPSGPRPGVESTTTTSDEAAWREQVERAVERIEAGDLRKVVLATALRADLADDLDPRDLLERLRQSYPSCFRFLVEPTGDAAFLGATPERLVTLDDDSVQTVALAGSVGRGDTPEEDAELAAQLRDSEKIRHEQRLVTDTIAAQLGAFGDVSVGERSVRKLSNIQHLNTPITTDVSKDTHVLDVAEALHPTPAVGGLPPDAALDVIRETETFDRGWYAAPVGWFDGDGDGTFAVGLRSAVARDRTVTMFAGNGIVADSDPNEEWAEVQLKFQPILDELRR

SEQ ID NO: 94002 - protein, 441 aa, Halobacterium salinarum
  misc_feature (1)..(441): tr|B0R4U2|B0R4U2_HALS3 Isochorismate synthase OS=Haloba cterium salinarum (strain ATCC 29341 / DSM 671 / R1) OX =478009 GN=menF PE=4 SV=1
MSSLAGETTADGPVVATSCRVADVSTRAFLAAHAEPGFHWADPDGLELSGAGTAASVTAAGGDRFAAVREWSTGLFADLTHDGPDAARPRLFGGFSFFDTHTAAGVWQGFPPARFVLPAIQLTSVGDETWLTAIEAGPDATVASASASLADARDAVDSLPAMQAAGPRPGVTDTTPTPGRDAWTAGVQDAVDRIQSGPLRKVVLATALRADLAEPATPCALLERLRQRYPACFRFLVAPADGGVFLGATPERLASLRGGRVETVALAGSVGRGDSPAADARLADRLRESDKLRHEQGVVVDTIARRLEGIGDVAVGDRDVRQLSTIQHLETPISAAVSADTHVLDVIETLHPTPAVNGLPPADALATIRDTETFDRGWYAAPIGWIDADGDGTFGVGLRSGVVDDDSVTLFAGNGIVGDSTPDAEWEEVQLKYRPVLDELQ

SEQ ID NO: 94003 - protein, 456 aa, Halobellus sp.
  misc_feature (1)..(456): tr|A0A498F8D5|A0A498F8D5_9EURY Isochorismate synthase O S=Halobellus sp. Atlit-31R OX=2282130 GN=DVK02_12470 PE =4 SV=1
MESLRTDAAGTHLVSRSVPIAAPSFRAVLREADTPRTVWNAPNEATVVGSGAAATLTADGPARFDSIREAAETLFASGDVHAGTEAARPRLFGGFAFHGDSASGPPWEDFPGARFVFPHVQVTWTDGDDPDADAWVTVNAVGDDVDPDTVEAALADARDRIESLPEADPPAGPPGVSGRRRTTARDDWTEGVEAAVSRINSGDLEKVVLAQALDVDLETELSLPDVLPRLAEKYPDCYHFLIEPEPADARAQSSFFGAAPERLVSVRGRTVETDALAGTTGRGETPAEDEWLAQELARDEKNAHEHDLVAETIETQLAPFAASVSPGPRRIKRLATVQHLWTPITATLDRDEHVLSLVEALHPTPAVGGLPPEAALDTIRETEPFDRGWYAAPVGWIDAAGYGTFAVALRSAVAQGDVATLFAGVGIVPDSDPDREWDEVQLKYRPILDELEAEDA

SEQ ID NO: 94004 - protein, 446 aa, Halococcus sp.
  misc_feature (1)..(446): tr|A0A3A5JJR0|A0A3A5JJR0_9EURY Isochorismate synthase O S=Halococcus sp. IIIV-5B OX=2321230 GN=D3261_12165 PE=4 SV=1
MAQAGNEARPSGVDGGRLVSRTREVADRSFRAFLETASVPRVAWATPDGLELAGGGAAAVVSAEGDDRFDSLREDATRLFETVDATGPPAARPRVVGGIAFDADHAPTPPWEGFPAAEFFLPEVQLTRADGRTWLSVTEYGPDATPEAVEERLDERAGSVADLPMMSPSGGPPGVAATRRTTTKAEWTAGVERAVERIRTGDLRKVVLATALAADLETEIDLPAVLERFRRTYPECYRFLVQPTADAGFFGPPPERLVRMTGSRVETEALAGSAERGDTPEDDADLAAGLETDAKTVHEQALVAEAIADRLAPLGDVTVGERRVAAFANIQHLRTPITAELREETHVLDVVEALHPTPAVGGLPLERAREVIDETETFDRGWYAAPVGWFDAAGDGEFAVGLRSAVAGGRRATLFAGDGIVADSDPDAEWAELGPKFRPVLDELER

SEQ ID NO: 94005 - protein, 446 aa, Halodesulfurarchaeum formicicum
  misc_feature (1)..(446): tr|A0A1J1ACD5|A0A1J1ACD5_9EURY Isochorismate synthase O S=Halodesulfurarchaeum formicicum OX=1873524 GN=menF PE =4 SV=1
MAEDLHDRHQADRLDAAVRTTGPRTLREAIQALDPITAVWASPDGPAVLAVGQAKTVTASGAARFQEVKRRGDRLLERVETAHLPERARPRLFGGLSFFDQATLEPPWTDFEPAAFVLPAIQVTLGRDQTLVSGFGAGAAPPRLDQIVQQLAHAGEGTQTKTDPRISATATDLRADRPDWIERVRAIQDRIETGPLQKAVLAAALDVALTDPLPLGAVLKTLTDRYPSCYRFSFTPPGTQAGDTPPAQFFGATPEQLVGKRGRTVETEALAGTVERGATEAIDAANVSRLQRDSTLAVEHEFVASRIAEQLRETAATVTVGDREVRSLANVHHLRTPIHATLDTDTHVLDFVATLHPTPAVGGHPPEAALETIHEVESTVRGWYAAPVGWFDANGDGEFAVGIRSALARDSRVTLFAGNGIVAGSDPETEYEELAAKFRPIREVLE

SEQ ID NO: 94006 - protein, 441 aa, Haloferax mediterranei
  misc_feature (1)..(441): tr|I3R4T0|I3R4T0_HALMT Isochorismate synthase OS=Halofe rax mediterranei (strain ATCC 33500 / DSM 1411 / JCM 88 66 / NBRC 14739 / NCIMB 2177 / R-4) OX=523841 GN=menF P E=4 SV=2
MEPLRTDEVTTHLVSRSVRLSAPPVTASLAAVHRPRTVWTAPDEPAVVGGGAAVTVEADGPARLTQVRETAASLFDGADIDGPSVARPRFFGGLAFHEGATGRDPWSDFPAARFVVPEVQLVFDGDEAWLTVTAAGDDPEMVEQRLVEVRETLTDLPDAPPQGPPGVSKRHRMTSVDAWRDSVEVAISRILAGDLRKVVLAQALEVELDRPASVPDLLARLGDTYPECHRFLVEPGVGASFFGATPERLVSLRGREVETGALAGTTGRGDTDDEDEWLADELLSSEKDSHEHELVAETIREQLDPLSAEIRVGDRGIRKLATVQHLWTPIDATLERDEHVLSLVDALHPTPAVGGLPPAAALDVIRETEPFDRGWYAAPVGWFDADGDGSFAVAIRSAIVDDTLATLFAGVGLVADSDPDAEWDEVQLKYRPILDELERDD

SEQ ID NO: 94007 - protein, 443 aa, Haloferax sp.
  misc_feature (1)..(443): tr|A0A498EUB5|A0A498EUB5_9EURY Isochorismate synthase O S=Haloferax sp. Atlit-109R OX=2282134 GN=DVK03_07285 PE =4 SV=1
MEPLRTDEVGTHLVSRSVRLSAPPVSASLAAMQRPRALWTAPDEPTVVGGGVAVAVEADGPERLARVRRAATALFDGADVDGPGIARPRFFGGLAFHEEATGRDPWADFPAARFVVPEAQVAFDGDDAWLTVTAVDAEADAETVDDRLDDLRETLESLDDAPLEGPPGVSDRHRTTSVEAWHESVDAAVSRIRAGDLRKVVLAQALEVELDRPAAAPDLLARLGGTYPDCHRFLVEPNGGASFLGATPERLVSLRGREVETGALAGTTGRGDTDDEDEWLANELLGSEKDNHEHELVAETIREQLAPLSAEIRVGDRGVRKLATVQHLWTPIDATLERDEHVLSLVDALHPTPAVGGLPPEAALGVIRDTEPFDRGWYAAPVGWFDADGDGSFAVALRSAIVEETLATLFAGVGLVADSDPDAEWDEVQLKYRPILDELERDD

SEQ ID NO: 94008 - protein, 392 aa, Haloferax volcanii
  misc_feature (1)..(392): tr|A0A558G8I3|A0A558G8I3_HALVO Isochorismate synthase ( Fragment) OS=Haloferax volcanii OX=2246 GN=FQA18_13890 PE=4 SV=1
VAVAVEADGPERLARVRRAATALFDGADVDGPGIARPRFFGGLAFHEEATGRDPWADFPAARFVVPEAQVAFDGDDAWLTVTAVDAEADAETVDDRLDDLRETLESLDDAPLEGPPGVSDRHRTTSVEAWHESVDAAVSRIRAGDLRKVVLAQALEVELDRPAAAPDLLARLGGTYPDCHRFLVEPNGGASFLGATPERLVSLRGREVETGALAGTTGRGDTDDEDEWLANELLGSEKDNHEHELVAETIREQLAPLSADIRVGDRGIRKLATVQHLWTPIDATLERDEHVLSLVDALHPTPAVGGLPPEAALDVIRDTEPFDRGWYAAPVGWFDADGDGSFAVALRSAIVEETLATLFAGVGLVADSDPDAEWDEVQLKYRPILDELERDD

SEQ ID NO: 94009 - protein, 448 aa, Halogeometricum borinquense
  misc_feature (1)..(448): tr|A0A482TNZ3|A0A482TNZ3_9EURY Isochorismate synthase O S=Halogeometricum borinquense OX=60847 GN=ELS19_06585 P E=4 SV=1
MASLRTGEMEMHLVSRSVPVSAPSFRAVLRAADAPRTVWSAPDEATVVGSGAAATVTADGPDRFDRIREAAEELFSSGDVHAGTEAARPRLFGGFAFHADSTDGSPWEDFPGARFVFPRVQVTYAENGTWLTVNAVGPDANAEAVEERLARERERIESLPDPGPVSDPPGVVHRRRTTAKDDWNAGVNAAVERISAGDLRKVVLAQALAADLASDLSVPDILDRLGDSYPDCYRFLVEPEPDADRPQASFFGATPERLVSLRGRTVETGALAGTTGRGETPAEDEWLARELLDDEKNVHEHELVAETIRDQLAPFASSVNTGDRCVKRLATVQHLWTPITATLATSEHVLSLVEALHPTPAVGGLPPEKALETIRDTEPFDRGWYAAPVGWIDAAGYGSFAVALRSAVSRDDTTTLFAGVGVVEDSDPDREWDEVQLKYRALLDELER

SEQ ID NO: 94010 - protein, 453 aa, Halomarina oriensis
  misc_feature (1)..(453): tr|A0A3P3RC43|A0A3P3RC43_9EURY Isochorismate synthase O S=Halomarina oriensis OX=671145 GN=EIK79_10120 PE=4 SV= 1
MSRLRGGESVASFEGSLVSRSIPIDPPSFQAVLQAAPAPRTVWAAPDDTDTESTENDRDPTVIGSGAAVVLRADGPARFERIRSQADALVTDADTDTAWPARPRLFGGFAFHDDHDPTPPWTGFSGAQFVLPRIQITWKDDTAWLTTNAIGDSPALETRIERAHRWVESLSATGPTADPPGIHHRERLTDRATWRTAVTRSIDRIRAGELRKVVLAQALRATVDGKLSTADTLCRLRESYPDCFGFLVDATEGRHFLGATPERLVSLRGQSIHTGALAGTIGRGNTPEEDERLARELQESEKNAHEHDLVVNAIREQLAPFTRQITTDDRRVRRFATVQHLETPMSAKLAREEHVLSLVEALHPTPAVGGLPPDRALTTIRTTEPFDRGWYAAPVGWFDTEGNGSFAVALRSAVATQDVATLFAGVGIVSDSDPDDEWDEVQLKYRPVLDALQ

SEQ ID NO: 94011 - protein, 452 aa, Halomicrobium mukohataei
  misc_feature (1)..(452): tr|A0A4D6KCR2|A0A4D6KCR2_9EURY Isochorismate synthase O S=Halomicrobium mukohataei OX=57705 GN=E5139_03530 PE=4 SV=1
MSRQDAAETEPASVGAETYVSASRRIDVSPLAAAGAVPDRRRFCWLHPEEPDLLAVGATAAVTVDSPDRFETADDRLTELFGAVDGPDAPEIAAPRAVGGFAFFDGNTVPADTQSHWRDFDDGTFVLPRAQIVAGDDATWLTVTVPEDEHSELSSQLDGWADRLTDAGTHDGTEPEATAFHWSLSREEWERTVDDVIGRIESDGLDKVVLAQELTVDLDAPVPVAPVLSRLRETYPNCTTFCFSPTPGRTFFGATPETLVALADGHVQTEALAGTTDRGETAAEDTDLADAMLGDEKYQVENRIVADTIADALRPVADDVTVAEPSIKRITNLQHLHRPITATVPSETSVLSLAERLHPTPAVGGSPRRAASDVIRDVEPFDRGWYASPVGWVDGDGDGTFVVGIRAGLTWDERLALYGGAGIVTGSDPTTEYGEVRSRFEPILDALEVELP

SEQ ID NO: 94012 - protein, 474 aa, Halomicronema excentricum
  misc_feature (1)..(474): tr|A0A4Q7E976|A0A4Q7E976_9CYAN Isochorismate synthase O S=Halomicronema excentricum str. Lakshadweep OX=2294035 GN=DYY88_09300 PE=4 SV=1
MTVAPSRSNPLPHYPQIHQALQASLQQAQQANAERLVSLSFPLPMVDPLAVLLTYPQPHHRQCYFESPSRGQAIAAWDALICEHFSGRDRFATARQAIAQWQPRIQAIPQRPEGPYFFCSFSFFDTVATAIGGFAPATVLLTRWQVVRQKQRCVLIANVLIRPHSRLAPLARAIAEQVSQLQRFAPSARLLESHWGRDAVSWQPQLARPEGQQFQQKVTSTLAAIHRHDLQKQVVAQAFDVTRTHPFRRDIALPRLRSRYPDCYIFSFSGEGDSHFIGASPERLLSIRQGRLVTDALAGSAPRGTTPERDRDIGQQLLKNPKEQQEHQLVLDFIVNHLEAEGLHPCYSTPPGLLRLSNIQHLHTPICAEVSPQTSPLRLVECLHPTPAVAGVPMAAACDRIQQEETCDRGLYAAPLGWIDPAGNSEFIVGIRSALIQKNQARLFAGAGIVADSDPAQELAEIQLKLQALAEALG

SEQ ID NO: 94013 - protein, 470 aa, Halomicronema hongdechloris
  misc_feature (1)..(470): tr|A0A1Z3HP69|A0A1Z3HP69_9CYAN Salicylate biosynthesis isochorismate synthase OS=Halomicronema hongdechloris C 2206 OX=1641165 GN=pchA PE=4 SV=1
MPVVPYRTVIQQHRSAIHAALTQGYQQAICTNRPHVVSLSLPIPSIDPLRLLHQSSPYERHLYLENTSQHQATVALGSLIEASAIGPSRFDRVHNFIETWCHQISCYDELAEYSPGIQFFCSFAFFDTPTHSDSPFPAASVFLPRWQITQCRQTSTLIANLLLTPLSDLEALLPDILQQLRRIESLAESPLSAYPPAPSLIQPALATQVFTQAVHRALQRICHNRLRKIVLAHALDVLASQPFNRAQLLERLRQQHPDCYVFSVGNGHGVSFIGASPERLLSIRQRRLITDALAGSSPRGDTAETDALLARQLLTSVKEQDEHQFVVDFLVRRLTELGLRPSYRTRPGLLQLSNIQHLHTPIRATVPLHTHPLHLVKALHPTPAVAGVPTDQACQQIRRFEQFDRALYAAPIGWIDHQGNSEFIVGIRSALIQANRARLYAGAGIVAGSDPERELDEIRLKLRALMEALV

SEQ ID NO: 94014 - protein, 440 aa, Halomonas alkaliantarctica
  misc_feature (1)..(440): tr|A0A4R7YPM8|A0A4R7YPM8_9GAMM Isochorismate synthase M enF OS=Halomonas alkaliantarctica OX=232346 GN=menF PE= 3 SV=1
MHSNPIEALRHQLATLCHAAQKGVIRLSTPCQVNDMMGWLNMQSVYPRLYWQSRDVGAVEYATLGAVNAFESLAALKTDLFALNDIGGQQPDFFGGMAFDPDTPGWAHFPACYFLLPRIELKRHQGGATLSLNLRFDDRCPSAEIAQAHACLDALAAEQPLPRLQPLVYQREDRPSQQEWAAWVGLVTNLDHLVRTPKVVLSRETRLTTPQPPNPWALLLRWQSGAADCFHFGVQLIPSEAFIGCPPEQLYKREGRHLTTEALAGTTRRGRDAEQDQTFAAELLADKKNTLENQCVYQQLLTQLEPLSSQVQMGEAHIVKLRSVQHIRRLIHAELHRDVTDQQLLAVLPPTPAVGGVPRESALAFIRQHECHRRGWYAGVFGRISHASSDLAVAIRCAHIGPEAIRLYAGAGIVAGSQPDEEWHELDTKIADIMSLLGMG

SEQ ID NO: 94015 - protein, 441 aa, Halomonas boliviensis
  misc_feature (1)..(441): tr|A0A265E1X2|A0A265E1X2_9GAMM Isochorismate synthase M enF OS=Halomonas boliviensis LC1 OX=1072583 GN=menF PE= 3 SV=1
MQSTHPIEALKHQLDTLCETASKGFIRLSTPCQVESLMGWLNVQSVYPRLYWRARDAGAIEYAALGVVKAFDSLGGLQADLAALADIGGEQPDYFGGMAFDPVTPGWQHFPGCHFLLPRIELRRHQTGATLSLNLRFDDRCPEAEIAQARACLAALEEEQPLPCLLPHVYQREDRPSQKEWAASVAQVTNPDHLGHTPKVVLSRETCLTTRETPNPWALLARWQVGATDCFHFGIQLTPHEAFIGCPPERLYKREGRHLMTEALAGTTHRVRDAQQDQALADELLADKKNSLENQCVYQQLLTQLEPHSSQVNMGEAHIVKLRSVQHIRRLIHAELHSDVTDQQLLSVLPPTPAVGGVPRESALAFIRQHERHRRGWYAGVFGSISHANSDLSVAIRCAHVGPEAIRLYAGAGIVAGSQPDEEWRELDTKIADIMSLLGMG

SEQ ID NO: 94016 - protein, 440 aa, Halomonas campaniensis
  misc_feature (1)..(440): tr|A0A2D0AXV1|A0A2D0AXV1_9GAMM Isochorismate synthase M enF OS=Halomonas campaniensis OX=213554 GN=menF PE=3 SV =1
MHSNPIEALRHQLATLCHAAQKGVIRLSTPCQVNDMMGWLNMQSVYPRLYWQSRDVGAVEYATLGAVNAFESLAALKADLVALNDIGGQQPDFFGGMAFDPHTPGWAHFPACYFLLPRIELKRHQGGATLSLNLRFDDRCPSAEIAQAHACLDALAAEQPLPRLQPLVYQREDRPSQQEWAAWVGLVTNLDHLMRTPKVVLSRETRLTTPQPPNPWALLSRWQSGAADCFHFGVQLTPSEAFIGCPPEQLYKREGRHLTTEALAGTTHRGRDATQDQALAAELLGDKKNTLENQCVYQQLLTQLEPLSSQVQMGEAHIVKLRSVQHIRRLIHAELHHSVTDHSLLSSLPPTPAVGGVPRESAMTFIRQHERHQRGWYSGVFGRISHTSSDLAVTIRCAHIDSEMIRLYAGAGIVAGSQPDEEWRELDSKIADIMSLLGMG

SEQ ID NO: 94017 - protein, 398 aa, Halomonas elongata
  misc_feature (1)..(398): tr|E1V3P0|E1V3P0_HALED Isochorismate synthase OS=Halomo nas elongata (strain ATCC 33173 / DSM 2581 / NBRC 15536 / NCIMB 2198 / 1H9) OX=768066 GN=entC PE=4 SV=1
MPRTHDDATRLQFVSPERGLHASGVMARITAPAWEGWQPDGDFQHAIRSTMELAQQAGQQAPIVMGAIPFDTRQPSCLYVPRHYEWREPTPLPADTGDNASASLAEASDIPQEAAFKQAVRQAIANFQHSDIRKAVLSRILELRLSNAVNIDQLLMRLRRQNPGGYQFRVPMADGATLVGVSPELLLRKEGTAIRSNPLAGSAKRQADDEQDRAMAERLLASAKDHHEHRLVIEEIRQVLGPCCTSLDIPESPSLIGTSALWHLSSNLEGRIADPATTALQLACRLHPTPAVCGYPTESARKLIDLVEPFDRGLFTGMVGWCDAEGNGEWAVTIRCGSIKHDTIRLFAGAGIVEASQPDAEWAEIQAKLGTMLNAFGLDASQLATHSWCDRPADEVVS

SEQ ID NO: 94018 - protein, 432 aa, Halomonas endophytica
  misc_feature (1)..(432): tr|A0A2N7U3X6|A0A2N7U3X6_9GAMM Isochorismate synthase M enF OS=Halomonas endophytica OX=2033802 GN=menF PE=3 SV =1
MPPSAITRRLSAMRTQTPSGFVRLGWPVMVERPLEWLRAQSVLPRFYWRSRGKDACEHAGIGCAHLVTATHEWEPAASPDGVETPRYFGGLAFDAEALGWPGFGACRFVLPRLELEHRAGRAVLYLNLYFDGRDRDAELDAAEAALNALRPALSPAPLTPTGFTRHDRPSAREWAEWITQATLLSDQARTPKVVLSRESRLATAQPVDPWILLNQWRQLAGDCFHFGFQFAPEAAFIGCSPERLYRREGTRLLSEALAGTSRRDGDPARDAALAAELLADPKNRRENQLVHADILARLAPLSHHASLAEPGIVKLRALQHIRRDIEAELHPWVRDRHLLAALHPTPAVGGTPRDAALKFIRRHESHRRGWYAGACGMLSHETTELTVAIRCARVTAGAVTLYAGAGIVIGSVPAAEWDELEAKIADVMSLLG

SEQ ID NO: 94019 - protein, 451 aa, Halomonas hydrothermalis
  misc_feature (1)..(451): tr|A0A291JTH9|A0A291JTH9_9GAMM Isochorismate synthase M enF OS=Halomonas hydrothermalis OX=115561 GN=menF PE=3 SV=1
MQVIQAAKALAAQLSALDLLACRGTQSLSVPCEVEDLVGWLNAQRVTPRLYWQPREASAAGYAVLGEARAFDSLVALQVDMQRQAQAQAQAQAQAQPASGSPDYFGGVAFDAQAAGWPGFGDCRFVLPRVLLKRQQGRCTLSVNLRFDDRPPAEELAAAQACLAAIVPEKPLPPVAHGSYQRCDTPTRPEWARWVSQVTQPERLQQLPKVVLSRETCLTAERVPSPWALLGRWQAEARHCFHFGVQWAPGTALIGCSPERLYRRQGQQLVTEALAGTARRGRDTAQDEALAGALLADKKNGLENQCVYQQLLTQLEPLAQRLEMDEAHVVPLRSVQHIRREIHAELHPFITDQQLLSVLPPTPAVGGTPRSAALARIRELERHARGWYAGAFGRVGHGSSELAVSIRCAQVSDTAIRLYAGAGIVAGSQADDEWHELDAKIADILSLLGMG

SEQ ID NO: 94020 - protein, 441 aa, Halomonas nigrificans
  misc_feature (1)..(441): tr|A0A2A4HPG8|A0A2A4HPG8_9GAMM Isochorismate synthase M enF OS=Halomonas nigrificans OX=2042704 GN=menF PE=3 SV =1
MMQFNPIEALKHQLDTLCDTAKTGFVRLNTPCQVDGLMGWLNRQSVYPRLYWHSRDADAIEYATLGAVNVFDSLAALEADLAVLAEIGGQQPNYFGGMAFDPGTPGWEHFPACHFVLPRIELQRHQGGATLSLNLRFDGRCPTAEIAQARACLDALVEEQPLPCLQPHVYQREDRPRQQEWAAWVGKVTNPDHLMHTPKVVLSRETCLTTSQTPNPWALLSRWQAGAADCFQFGVQFEPHEAFIGCPPERLYKREGQHLITEALAGTTRRGRDTPQDQMLAAELLADKKNTLENQCVYQQLLTQIEPLAHQVHMGEAHIVKLRSVQHIRRLIHAELHSNVTDQQLLSALPPTPAVGGVSRESALAFIRQHECHQRGWYSGVFGRISHASSDLAVTIRCAHIGQKAIRLYAGAGIVAGSQPDEEWRELDTKIADIMSLLGMG

SEQ ID NO: 94021 - protein, 408 aa, Halomonas sp.
  misc_feature (1)..(408): tr|A0A4Y8W3U9|A0A4Y8W3U9_9GAMM Isochorismate synthase O S=Halomonas sp. TBZ202 OX=2599398 GN=EQG41_07420 PE=4 S V=1
MGSSKARDSLETETVEAPARDDRQLLFTSTHRELTATAPVKALTLPPCAGDRPDSPFQLAIRQALEGARRGGQANPIVVGAIPFDEHEPSCLYVPHRYEWRARDVPRRRADTAKALPLLLEQRSLPDERGFKKAVEQAIVNFGFGDVRKAVLSVMRELHFSAPLDVDRLLEGLSAHNPDGYRFRIPLADGADLIGISPELLLGKEAERVVSNPLAGTARRLPSAALDREAAERLLQSPKDHYEHRLVVDDVLQALEPHCAELTSPERPSLLSTTALWHLSTRIEGRLHDPDVTALQLACRLHPTPAVCGYPTQDARRLISLIEPFERGLFTGMVGWCDMAGNGEWVVTIRCGTVKRDVVRLFAGAGIVEASQPDAEWAEVQAKLGTMLQVCGVPAEERTLRVDTGVPS

SEQ ID NO: 94022 - protein, 441 aa, Halomonas sulfidaeris
  misc_feature (1)..(441): tr|A0A365TP06|A0A365TP06_9GAMM Isochorismate synthase M enF OS=Halomonas sulfidaeris OX=115553 GN=menF PE=3 SV= 1
MLLIKPIDALKHQLDTLSDSARRGFVHLSIPYHVGNVMGWLNAQSVYPRLYWQSRDEGAVEYAALGVVKAFDSLAALQADFTALADSGGEQPDYFGGMAFDPDAPGWQHFPGCYFLLPRIVLRRHQGGATLSLNLRFDDRCPEAEIAQARACLAALEEEQPLPCLLPHVYQREDRPTLREWTASVAQVTHPDQLGHTPKVVLSRETCLTTPETPSPWSLLARWQTGAADCFHFGVQLTSHEAFIGCPPERLYKREGRHLMTEALAGTTRRGQDAQQDQTLADKLLADKKNNLENQCVYQQLLTQLEPLSSQVQMGEAHIVKLRSVQHIRRLIHAELHIGITDQQLLAVLPPTPAVGGVPRDSSLAFIRQHERHRRGWYAGVFGRISHASSDLAVTIRCAHISPEAIRLYAGAGIVAGSQPEEEWRELDTKIADIMSLLGMG

SEQ ID NO: 94023 - protein, 441 aa, Halomonas titanicae
  misc_feature (1)..(441): tr|L9UCQ2|L9UCQ2_9GAMM Isochorismate synthase MenF OS=H alomonas titanicae BH1 OX=1204738 GN=menF PE=3 SV=1
MHSTHPIEALKHQLDALRHTDKKGFMRLNTPCQVGNLMGWLNVQSVYPLLYWQSRDAGAVEYAALGIVKAFGSLAALQADLAVLADSGGEQPDYFGGMAFDPGTSGWQHFPDCHFLLPRIELRRHQAGATLSLNLRFDDRCPEAEIAQARACLAALEEEQPLPCLLPNVYQREDHPTQKEWTASVEQVTHPDHLSHTPKVVLSRETCLTTPETPSPWALLARWQAGAADCFHFGVQFTPHEAFIGCPPERLYKRKGRHLMTEALAGTTRRGQDTQQDQALADELLADKKNSLENQCVYQQLLTQFEPLSSHVQMGEAHIVKLRSVQHIRRLIHAELHRDVTDQQLLAVLPPTPAVGGVPRKSALAFIRQHERHRRGWYAGVFGRISHTSSDLAVAIRCAHIGPETIRLYAGAGIVAGSQPDEEWHELDTKIADIMSLLGMG

SEQ ID NO: 94024 - protein, 460 aa, Halonotius roseus
  misc_feature (1)..(460): tr|A0A544QL18|A0A544QL18_9EURY Isochorismate synthase O S=Halonotius roseus OX=2511997 GN=EWF95_13100 PE=4 SV=1
MESPHTADRPRLVSRSVPLADPVPSFRTLLDAMEPPRTVWNAADEACVVAGGAAATLTADGADRFDGIRTAAERLFETGDVHAGTEAACPRLFGGFAFHADGADADDGDTPGDSDDDHTSPWAGFPDARFVFPRVQVTRTDSGPWLTVNAVGPSATPAAVEAKLDEERERLLAHGEGAAAGPRPGITDRRRTTTPTGWRQAVRNAVERIDAGTLQKVVLAQALEVDLGDDLAVADILDRLSDKYPDCTRFLVEPDSDPPAAFFGATPERLVSLRGRTVETGALAGTTGRGETPAEDEWLAEELLTDDKNVHEHELVAETIREQLAPFAASVSVGERAIKRLATVQHLHTPITAELADDTHVLDVVEALHPTPAVGGLPPDRALETIRETEPFDRGWYAAPVGWIDAAGNGTFAVGLRSAVATRRQATLFAGVGIVGDSDPDAEWDEVELKFRPILDELEA

SEQ ID NO: 94025 - protein, 448 aa, Halopelagius longus
  misc_feature (1)..(448): tr|A0A1H1AU13|A0A1H1AU13_9EURY Isochorismate synthase O S=Halopelagius longus OX=1236180 GN=DWB78_01505 PE=4 SV =1
MESLGSDEAGARPVSRSVRISKPQFRAVLRAADAPRTVWSAPDEATVVGSGAAATVTADGPNRFERIREAAEALFSSGDVHAGTEAARPRLFGGFAFHADSVAGPPWEQFPGARFVLPRVQVTYADNGTWLTVTAVGPDADPRTVERELDRHRERLRSLPDPGPPADPPGVVGRRRTTAKGDWRSSVNAAVERIRAGDLEKVVLAQALDVDLGDDLSVPDVLWRLGEAYPDCYRFLVEPVGDDGPQASFFGATPERLVGLRGRTVETDALAGTTGRGETPAEDEWLANELLADEKNVHEHELVAETIRDQLAPFASSVNAGARRVKRLATVQHLWTPITAELATDEHVLSLVEALHPTPAVGGLPPDRALSTIRDTEPFDRGWYAAPVGWVDAAGYGSFAVALRSAVSREDSATLFAGVGVVEDSDPDREWDEVQLKYRPILDELERS

SEQ ID NO: 94026 - protein, 443 aa, halophilic archaeon
  misc_feature (1)..(443): tr|G2MJ01|G2MJ01_9EURY Isochorismate synthase OS=haloph ilic archaeon DL31 OX=756883 GN=Halar_1501 PE=4 SV=1
MESPRQAGAEPVETTLVTGTREVEDVSFRAFLASHAAPRFHWAAPDGLELVGAGEAARLMGHGTDRFEAVRDVAIECFEGADLVDGAARPRFFGGGAFHDDHEPSPPWEGFRAAEFVLPQIQLVRADEATHLTVSRGDGDKEALERDLVAALDTLSELPAMRPVGDPPGVVASRRTTTETEWTEQVESAIRRIEDGELRKVVLAVALAVTLETEVTVPDALERLRRSYPDCFRFLVQPTDQAGFFGVPPERLVRLEGPDARTEALAGSVARGDTPEADAELAQSLLDSEKIQHEQGLVTEAIEERLAPFGTVHVGDQGVRKLANIQHLQNPISLDLEVEAHVLDLVEALHPTPAVGGLPPAAAERTIRETETFERGWYASPVGWFDADGDGEFAVGIRSAVAGGRRATLFAGNGIVADSDPAAEWEEISLKYEPILAELARED

SEQ ID NO: 94027 - protein, 489 aa, Halopiger xanaduensis
  misc_feature (1)..(489): tr|F8D820|F8D820_HALXS Isochorismate synthase OS=Halopi ger xanaduensis (strain DSM 18323 / JCM 14033 / SH-6) O X=797210 GN=Halxa_3300 PE=4 SV=1
MDRTSGKREVEGRLAGTDTAATRSVTVDGELVSRSRELEDVSFGAIAAADVDGVDADTAAEANQTDRARIQWAAPDGLELVGRGVAARFVATGPERFAAIRRQASRAFDGLEHDGPEVARPRAVGGFAFHDYHAADRTDSDDSDSTARSTPNPQPNWDDFDAASFVIPRVFVVRSDGEGTWLTAVGTDAGEATARLERWHDRIADLPAMQPSGAGPGVAATHRTTAPEEWRTGIEAALERIADGRLTKVVLAQALSVALEGPIDVGATLERLRREYPNCYRFRIGREGGVTFFGAPPERLVAKRGPRVATEALAGSAPRGETPDEDQQHADRLLESDKLRREHELVVDAIRDQLAPLARDLEIDGRTIRKLATIQHLRTPIEATLDGDRHVLEIVEALHPTPAVGGMPPDAAWETIRETEPFDRGWYAAPVGWFDADGDGEFAVGLRSGIATDEAVTLFAGSGIVADSDPDEEWEEVQLKFRPILDELR

SEQ ID NO: 94028 - protein, 446 aa, Haloplanus aerogenes
  misc_feature (1)..(446): tr|A0A3G8QW50|A0A3G8QW50_9EURY Isochorismate synthase O S=Haloplanus aerogenes OX=660522 GN=ATH50_0503 PE=4 SV= 1
MGISRSDETGSRLVSRSVRASVPSLRAALDAMPAPRTFWTAPDEATVVAGGAAATLTADGRDRFTAIKDGIDRVLRAGDVHAGTEAACPRLFGGFAFHDEGTEDETWADFPGARFVLPRVQVTDTDRGMWVTVNAVGPDATAEAVEARLESERERFESLDVPDPSPPPGIVSRTRTTPRDAWCDSVDAAVSRIRAGDLQKVVLAQALDVTLDRPLSVPDVLARLGDTYPDCYRFLVEPTDGDAPRPGFFGATPERLVTRHGRTVTTGALAGTTGRGDTPAEDDWLAEELLGDEKNVHEHELVAETIREQLDPFASTITAGQRRVRRLATVQHLFTPITATLDSDTHVLDLVEALHPTPAVGGLPPEKALATIRETEPFDRGWYAAPVGWIDAAGNGTFAVAIRSALSRGTKTTLFAGVGVVADSDPDREWDEVQLKYRPILDELER

SEQ ID NO: 94029 - protein, 448 aa, Haloplanus salinus
  misc_feature (1)..(448): tr|A0A368NCV9|A0A368NCV9_9EURY Isochorismate synthase O S=Haloplanus salinus OX=1126245 GN=DU504_14675 PE=4 SV= 1
MGIPRSDEAGPRLVSRSVRTSVPSLRAALDAMPAPRTFWTAPDEATVVAGGAAATLTAEGRNRFAAIKERIDRVLRSGDVHAGTEAACPRLFGGFAFHDEGTDDDTWDGFPGAQFVLPRVQVTDTDRGTWLTVNAAGPDASAEAVEERLGVARDRFEALDEPAPTPPPEIVSRTRTTRREAWRDSVEAAVSRIQAGDLRKVVLAQALDVTLDRPLSVPDVLARLGETYPDCYRFLVEPAADASAGRPAFFGATPERLVSRHGRTVTTDALAGTTGRGDTPAEDDWLAEELLADGKNLHEHELVADTIREQLAPFTSSISAGQCRVRRLATVQHLFTPITATLGGDTHVLDLVEALHPTPAVGGLPPERALATIRETEPFDRGWYAAPVGWIDAAGNGTFAVAIRSALARDAETTLFAGVGVVADSDPDREWDEVQLKYRPILDELERA

SEQ ID NO: 94030 - protein, 448 aa, Haloplanus sp.
  misc_feature (1)..(448): tr|A0A345E4W8|A0A345E4W8_9EURY Isochorismate synthase O S=Haloplanus sp. CBA1113 OX=1547899 GN=DU500_12865 PE=4 SV=1
MGIPRSDEAGPRLVSRSVRASVPSLRAALDAMPAPRTFWTAPDEATVVAGGAAATLSADGRDRFAAIKEGIGRVLRSGDVHAGTEAACPRLFGGFAFHDEGTDDDTWAGFPGARFVLPRVQVTDTDRGTWLTVNAAGPDAAPEAVEDRLDAERDRFEALDDPDPTPPPEIVSRTRTTPREAWCDSVDAAVSRIHAGDLRKVVLAQALEVTLDRPLSVPDVLARLGETYPDCYRFLVEPTADASADRPAFFGATPERLVSRHGRTVTTDALAGTTGRGDTPAEDDWLAEELLGDEKNLHEHELVAETIREQLAPFASSISAGQRRVRRLATVQHLFTPITATLDSDTHVLDLVEALHPTPAVGGLPPERALATIRETEPFDRGWYAAPVGWIDAAGNGTFAVAIRSALARGAETTLFAGVGVVADSDPDREWDEVQLKYRPILDELERA

SEQ ID NO: 94031 - protein, 447 aa, Haloprofundus sp.
  misc_feature (1)..(447): tr|A0A4D7H7Z0|A0A4D7H7Z0_9EURY Isochorismate synthase O S=Haloprofundus sp. MHR1 OX=2572921 GN=FCF25_13545 PE=4 SV=1
MNPAQRNQQTTASHAESTLVSRSCEIPDVSFRAFLADQTAPRVHWASPDGLELVGGGAAAHLSASGPERFDHLRDEAAAVFDDVDHEGPAATRPRMLGGLSFDAGHEETPPWTGFAAATFVLPRVQLTRGDDATWLTVVEYGPDATPETADSALDAARDSLSELPMMRPSGGSPGVVDRRWRTPRDEWVAQVEQVTERIRSGDLLKVVLATALDLELAERVDIPDVLERLRRTYPECYRFLVQPTDEAAFFGPPPERLVKRDGRTVETEALAGSMPRGETPEDDADFAASLLESEKLQHEQQLVADTVCEQLERFGDVTAHDKRIRKLSNIQHLWTPISATLDDDTHVLSLVEALHPTPAVGGLPLEAALETIRQTESFDRGWYASPVGWFDAEGDGEFAVGIRSGVAGGTRATLFAGNGIVGDSDPEAEWEELQPKVRPILDELER

SEQ ID NO: 94032 - protein, 567 aa, Haloquadratum walsbyi
  misc_feature (1)..(567): tr|Q18J12|Q18J12_HALWD Isochorismate synthase OS=Haloqu adratum walsbyi (strain DSM 16790 / HBSQ001) OX=362976 GN=menF PE=4 SV=2
MESRQTRLDDVTLVSRSARIPSLSSSVRDIFDIATSPRVVWSAPDETTVLGSGAAATIVATGSDRFESVRDAAESLFSTGDVHAGSEVARPRLFGGFAFHAERADSKPWKQFPNAQFIFPRVQITWSTDTHTETDTADNDSHAWITVNAVDPGATPDAVEYRLSQEIERVKTLESTNNSRSPPGVTCRHRRTSRDAWNRGVTAAINRISADNLQKVVLAQALEVELEETPVLGDIITRLGEHYPSCYRFIIEPVPGTPVDQRIHTDVNAMTTVGSEDIHNTSQSPAFFGATPERLVSVRGRTVETGALAGTTGRGETTAEDEWLAAELARDEKNVHEHELVAETIREQLSPYATAITSDSRRVRKLATVQHLWTPITATLEEDKHALSLVEALHPTPAVGGLPPTTAAETIRETEPFDRGWYAAPVGWIDAAGYGTFVVALRSAVAHDDAATLFAGVGIVADSNPDSEWDEVQLKYRPILDELESNDADDDTINQAQSEISTHTQGTVDDTMNESASTSISTPDTTVPSESNSQSNTTMEPTSDADADADADVDADADTNTNIDDTE

SEQ ID NO: 94033 - protein, 324 aa, Halorhabdus tiamatea
  misc_feature (1)..(324): tr|U2E5I9|U2E5I9_9EURY Isochorismate synthase protein ( Fragment) OS=Halorhabdus tiamatea SARL4B OX=1033806 GN= menF PE=4 SV=1
MESVRADTVGTAHDGDALAVRGCQLEDVAPAAVLDAAVRDRPWTAWAGPEETVAATGAAATITATDGDRFERVRRQAAALFADRDVQSSLPTFARPRLFGGFAFHDGDGGHHPEADWTGFPDANFHLPAVSVVERDGRTWLTTAAVGPDAESTAETALDRWREKLADASPPTTSPPGIRIRSEIPDRDAWIAQVEAAVDRIDRGDLLKVVLAGAQTVDLAGSLSAPAALGRLGETYPDCYRFGFAPGNTDAGTFFGATPERLLRRDGRRVQTAALAGSTGRGDTQAEDEWLAEELAESRKDTHEHALVVDAIREQLDDFAESVE

SEQ ID NO: 94034 - protein, 450 aa, Halorientalis sp.
  misc_feature (1)..(450): tr|A0A498L3F8|A0A498L3F8_9EURY Isochorismate synthase O S=Halorientalis sp. F13-25 OX=2479928 GN=EAF64_10855 PE =4 SV=1
MRGMEPAQREERVGPRAGAVLVSRTCEVPDVSYRAFLASHSAPRLHWAAPDGLEVVGSGAAVTLTAHGTDRFDRLREEATTIFRDVDRTGPAETRPRFLGGLAFNENHDPAPPWTGFPAAAFSLPETQLTRADGTTWLTVREYGQDVSPDDVAGRLERTREDLETLPSMCPSGGPPGVERTEVTPTKTEWTTQVESAIDRIADGDLRKVVLATALSVDLADEIDVPGVLERLRRTYPSCYRFLVQPTDEAAFFGPPPERLVKLSDGRVQTEALAGSVPRGETPEADAEHAKSLLESEKLQHEQRLVVDAIMDQLAPLGEVAEGEQGVRKLTNIQHLQTPITTTLSGDEHVLTIVEALHPTPAVGGLPPEKAWEVIRDTETFERGWYAAPVGWFDSDGDGEFAVGIRSGVAGGRRATLFAGNGIVTDSDPDEEWDEVKHKYRPILDELERE

SEQ ID NO: 94035 - protein, 456 aa, Halorubrum ezzemoulense
  misc_feature (1)..(456): tr|A0A481RFS9|A0A481RFS9_9EURY Isochorismate synthase O S=Halorubrum ezzemoulense OX=337243 GN=EO776_08750 PE=4 SV=1
MEQARSRSSSPLVSRTTEVVEPAFAAAFEALPTPRTTWSAPDDALVIGGGEAATLTASGGDRFAAIRESATELFESGDVHAGTEAARPRVFGGFAFHEGACDGEPWAPFPEARFVLPRVQLTYADNGAWLTVNAVGPDAGVDGVEDRLAREVDRFAALDAVDAGSPTAAAGSRPPRPGIRESRRTTSRDAWRESVGAAVDRIADGDLQKVVLAQALEADLAADFPRAATLERLAEKYPDCHRYWFEPAAGESAFFGATPERLVSLRGRTVETDALAGTTGRGETPSEDEWLARELLDDEKNVHEHELVAETVRDQLEPFAASVSAGERRVRRLATVQHLHTPITAELDADRHVLELVEALHPTPAVGGLPPDRALTTIRETEPFDRGWYAAPVGWIDAAGNGAFAVAIRSAVGTRRRATLFAGVGVVSDSDPDREWDEVQLKYRPILDELEGDAAD

SEQ ID NO: 94036 - protein, 456 aa, Halorubrum sp.
  misc_feature (1)..(456): tr|A0A4U7C2P7|A0A4U7C2P7_9EURY Isochorismate synthase O S=Halorubrum sp. CGM4_25_10-8A OX=2518116 GN=EXE52_1276 5 PE=4 SV=1
MEQARSRSSSPLVSRTTEVVEPAFAAAFEALPTPRTTWSAPDDALVIGGGEAATLTASGGDRFAAIRESATELFESGDVHAGTEAARPRVFGGFAFHEGACDGEPWAPFPEARFVLPRVQLTYADNGAWLTVNAVGPDAGVDAVEDRLAREVDRFAALDAVDAGSPTAAAGSRPPRPGIRESRRTTSRDAWRESVGAAVDRIADGDLQKVVLAQALEADLAADFPRAATLERLAEKYPDCHRYWFEPAAGESAFFGATPERLVSLRGRTVETDALAGTTGRGETPSEDEWLARELLDDEKNVHEHELVAETVRDQLEPFAASVSAGERRVRRLATVQHLHTPITAELDADRHVLELVEALHPTPAVGGLPPDRALATIRETEPFDRGWYAAPVGWIDAAGNGAFAVAIRSAVGTRRRATLFAGVGVVSDSDPDREWDEVQLKYRPILDELEGDAAD

SEQ ID NO: 94037 - protein, 441 aa, Halovibrio variabilis
  misc_feature (1)..(441): tr|A0A511UN22|A0A511UN22_9GAMM Isochorismate synthase M enF OS=Halovibrio variabilis OX=31910 GN=menF PE=3 SV=1
MQTKSPVEVLQHRLDSLPETGTNGFVRLSTPCQVENLLGWLNIQSMYPRLYWQSRDAGAVEYAALGVVNAFDSLAALEADLAALAAVGGEQPDFFGGMAFDPSTPGWEHFPACHFLLPRIELTCHQGGATLSLNLCFDDRCPKDEIAQAHACLDALVAEQPLPRLKPHVYQREDRPSQQEWAAWVWQVTNPDHLAHTPKVVLSRETCLTTPKTSNPWALLSRWQSGAADCFHFGVQFSPHEAFIGCPPERLYKREGRHLITEALAGTTRRGRDAQQDQVLATELLADKKNTLENQCVYQQILTQLEPLSSQVQMGEAHIMKLRSLQHIRRLIHAELHSDVSDQQLLSVLPPTPAVGGVPRESALAFTRQHERHQRGWYSGVFGRISHASSDLAVTIRCAHIDSETIRLYAGAGIVAGSQPDEEWRELDTKIADIMSLLGMG

SEQ ID NO: 94038 - protein, 573 aa, Handroanthus impetiginosus
  misc_feature (1)..(573): tr|A0A2G9GNA5|A0A2G9GNA5_9LAMI Isochorismate synthase O S=Handroanthus impetiginosus OX=429701 GN=CDL12_20654 P E=4 SV=1
MATCFTRLYCIAQFKGNESIKCSLSLSSTTGTAKTLVHFSNHKYQELSSLSINGCGGDPRTPIGTVETRTFPTAATPELAADRLNSAIYDLKMNPSSLDSGIIRIEVPIQQEIEALDWLRSQSNTHLPRCFFSGRDSSNIPLIEYGNGDASSSDQNDSQRKLVSVAGLGSAVFFRQLDPFSLDDWHSIKRFLSKNSPLIRAYGGMRFEPRSNIAPEWKGFGSFYFMVPQVEFDEFEGSSMIAATIAWDNRLSRPYREAIAALEATMLQISSVVRRLNGTGSRAAMLHQTHVPNRASWDSAIKKALDLMTRKDSSLVKVVLARSSRVLTTTEIDPLEWLTSLQVEGDKAYQFCLQPPESPAFIGNTPERLFYRDQLSVYSEALAATRRRGETESLDLQIGHDLLTSAKDHHEFAVVRECIRRKFEGACSSTIVEPNKALRKLPRIQHLYAKLKGTLQNEDDEFKILSLLHPTPAVCGLPTEEARMLISETEMFDRGMYAGPVGWFGGAESEFAVGIRSALVGKGLGAILYAGTGIVEGSKSHLEWQELELKTSQYTRLMKQETPFLAVREKVEL

SEQ ID NO: 94039 - protein, 398 aa, Herbiconiux sp.
  misc_feature (1)..(398): tr|A0A521MSV1|A0A521MSV1_9MICO Isochorismate synthase O S=Herbiconiux sp. OX=1871186 GN=EPO52_04810 PE=4 SV=1
MLLPRVDPQHPLIWMRKGQGIAGVGEALRLEFSGANRMLDACAAWKEVAEASTVIDPLGVPGTGLVAFGSFAFADDSAAASVLIVPKLVLGKRDGKYWVTRIVADGASGADGGGDAALPAARPLGSEYRLSLLPGAMNADAFRASVDAAVARIADQQLSKVVLARDLVGHLPAGSDLRRPLTDLALGYPDCWTYAVDGFVGSSPETLVSVSHGHVSARVLAGTTSRGSDAEADHDKAVALATSAKDLDEHGFAVTSVVNALAPHSRNLITSEIPFTLKLPNLWHLASDVVGTLSDGSTSLDLIAALHPTAAVAGTPRAEALSLISELEPFDRGRYAGPVGWVGADGDGEWAVALRSAQVDASGDITAYAGCGIVADSDAEREYLETKMKFRPIVEAFG

SEQ ID NO: 94040 - protein, 402 aa, Herbidospora sp.
  misc_feature (1)..(402): tr|A0A4U3M6W5|A0A4U3M6W5_9ACTN Isochorismate synthase O S=Herbidospora sp. NEAU-GS14 OX=2575442 GN=FDA94_30475 PE=4 SV=1
MSVALGLHPPLVVRTVPVRDPGDLISLLPGPAAYTWVHHGDGLVAWGEALRVTIPPGPGRFAWARDWLAGAFGHADIDDRVRRPGSGPVAFGSFTFDPASAGSVLVVPRVVVARRDGQAWLTTVGEENLGLVTPAVPPGRIRYSDGALTAPGWEHAVAAAVERITSGGLEKVVLARDLIATAEADIDPRVPLARLAARYPECYTFSVGGLIGATPELLVRHTGRAIESLVLAGTIPSGADPATLFDSPKDRYEHTCAVASVEAALKPLCAELDVPAEPELLSLPNVQHLASRVTGKLDDGASVLDVVAALHPTAAVGGTPTDDAVALIPRLEQMDRGGYAGPVGWIDARGDGEWGIALRCAQLDGPRARLFAGCGIMGGSDPAAELAEAQSKFRAMQYALEG

SEQ ID NO: 94041 - protein, 395 aa, Herpetosiphon geysericola
  misc_feature (1)..(395): tr|A0A0P6YLU6|A0A0P6YLU6_9CHLR Isochorismate synthase O S=Herpetosiphon geysericola OX=70996 GN=SE18_04760 PE=4 SV=1
MSSFEQERLRESAWQLLDTYQAESAFFFASPNHTLLAQLSYVDLISQTALPELEQRVHEALQRAERSGEVNPVVVGALPFAPDAAAYLALPSRVAWAGPLHAEAQPYWHNQRLPHCTIEPMPAPEHYKRGVAQALAKMQAGDLQKVVLSRSLQLTADAPLDVNLILASLARNNKTGYTFAVPLPTRRALVGASPELLLARNGNQVIANPLAGSIPRSSDPEEDARRAAGLLVSAKDLHEHKVVVDAVAAALELFCSNLEVPAPTVISTATMWHLSTTLVGELKPDAPSSLGLALALHPTPAVCGTPTEAARAAIREIEPFDRGFFTGMVGWCNAQGDGEWIVTIRCAEVVDQSLRLFAGAGVVLGSTPEAELAETGAKFRTMLLAMGLDSEGEVA

SEQ ID NO: 94042 - protein, 435 aa, Histophilus somni
  misc_feature (1)..(435): tr|B0UT52|B0UT52_HISS2 Isochorismate synthase MenF OS=H istophilus somni (strain 2336) OX=228400 GN=menF PE=3 S V=1
MFNLIRYKMDNLHEIKAEFIRLINQYQFDPKNDFSVLHLDLDEELNLLGWLKAQHHYPQFYLNFRDTNKKILGLGEVCRFTQVKSAQTFVQQFNLSLIGGCQFNGEPLFILPRLSFIQEQKLVIQLIIDNKKPWEQEKYDLLNIIHSLEKQVQLNPIHQSIQLITTKANQTEWCLWVEKALHEIKQKNLTKVVLANETDFKTDSPLNAKDFLAESEKYNTGCYHFLFAQNNTQAFIGSTPERLYVRKENRLITEALAGTAFITNDEHINQQQAQWLLQDPKNIYENSLVVEGICQHLIPYVEEITVSELEIKQLRQIQHLKREISARLKAGNTDAVCLNAIHPTAAIAGLPQKEAKVFLQNTETFDRTWYAGALGIMTETESEFCVTIRSSFIEQDYIRIFAGAGIVEGSIPLLEWQEIERKALGLISLLQKETE

SEQ ID NO: 94043 - protein, 384 aa, Homoserinibacter sp.
  misc_feature (1)..(384): tr|A0A5C8IHF2|A0A5C8IHF2_9MICO Isochorismate synthase O S=Homoserinibacter sp. GY 40078 OX=2603275 GN=FVQ89_011 10 PE=4 SV=1
MRRGEGVAGLGETLRLTFRGPDRIAQAAETWRRIAQAATVVDQVGISGTGLLAFGAFTFSAESEFESVLIVPQTIVGRRDGVSWVTQISIAGTPSAPREPEAIPLGAEFRISLQPGTVDRERYRKMVTDAVARIRTGPLRKVVLARDLVGHVPAGGDIRRVLVDLALGYPDTWTFAVDGHIGSSPETLVRVNHGQVSARVLAGSIARGADAESDHAAAVALATSTKDVDEHRYAVQSVLAALGPHARGADGRGVAASEYPFALKLPNLWHLATNIEGTLSDGSSALDLAAALHPTAAVAGTPTAAALETIRELEPLDRGRYGGPVGWVDANGDGKWAVSLRSAEVDAEGGIRAFAGAGILAPSDPDVEFDETALKFRPVAEAFG

SEQ ID NO: 94044 - protein, 506 aa, Hormoscilla sp.
  misc_feature (1)..(506): tr|A0A533NVK3|A0A533NVK3_9CYAN Isochorismate synthase O S=Hormoscilla sp. GUM202 OX=2480853 GN=EBE86_23410 PE=4 SV=1
MRVTSEHGNIFSEPKALENFLLGCQETAIAKDSTMIVSISQEIPLVDPLAVMAAIAPSDRLQFYWESAGEAIAAIDAATSIKITQADRFRKAQGFIHTCLANTISIGDLDRRFAGPHFFCSFTFFGQQSESVFPAATVLLPRLQVACSANHCILVTNLAIGPLADIKSICSKLWWDWHKISLCNNNGFHKAAGNKLPTGQLSVPPLRLAILGDTEDKFKQTVGEALELIRSERLSKIVIAHGISIQAKVPFREREALHNLRQLHGDCHIFMVSNGEGKSFIGATPERLMRIRCVPDSGIGALCPPSSDPSAPEGHSFGTENQQLFTEALAGSAPRGKTRREDADFANSLLASEKERREHQFVIDYIKGCLSKLGLKPEILPMPKLRKLANIQHLWTPIEAKVPPGVHPLSILAALHPTPAVAGTPREIACQEIPRYESFERGLYAAPLGWVDGRGNSEFVVGIRSALIEGDRATVYAGAGIVAGSDPKKELAEIQLKFQALLQALV

SEQ ID NO: 94045 - protein, 373 aa, Humibacter sp.
  misc_feature (1)..(373): tr|A0A345K2W6|A0A345K2W6_9MICO Isochorismate synthase O S=Humibacter sp. BT305 OX=2282656 GN=DVJ78_06450 PE=4 S V=1
MAGIGEAVRLTFSGPDRMSEACEAWRAIVSAATVSDPVQAPGSGLIAFGTFAFDDSSTAESVLIVPRTIVGRRGDVSWVTRIRVEGDATPAPEPELRRLGEEYRLTLLPGEVSPDDYRAMVEAAVGRITAGELSKVVLARDLRGHLPAGSDLRRVLYDLALGYPDCWTYAIDGFLGSSPETLVRVDHGTVSARVLAGTTARGADAVSDQERAVALATSAKDLDEHGFAVRSVLTALEPHSRGLATSEVPFTLKLPNLWHLASDVIGTLSDGSTSLDLIAALHPTAAVAGTPTADALALIRELEPFDRGRYAGPVGWVGADGDGEWAVALRSAQVDAAGDITAYAGCGIVAESVPEREYLETKMKFRPIVEAFA

SEQ ID NO: 94046 - protein, 399 aa, Hydromonas sp.
  misc_feature (1)..(399): tr|A0A345DB59|A0A345DB59_9BURK Isochorismate synthase D hbC OS=Hydromonas sp. F02 OX=2268024 GN=dhbC PE=4 SV=1
MNDVTQVGRACEKFMVEQNDLSGKTLFVSPHKSIIGKGVAAQLKVSSSAVNAAFVTEMLSQVEQGGGRRMLFAALPFDSNAKAYIQVPEQVMVLASPAADFAFDLVLPVKVDSVVSIPSEECYKSMVGHALDAIDAKSLNKVVLSRSLQISAQINVSNLIKQLLSSHAQGYKFAFHHEDSEGAMATLVGASPELLLSKNGVSVTSNPLAGSIPRCVDPEEDRRRAQNLLRSTKDLYEHELVVRSVAAALAPFCTQLSVPSRPSLLSTPTMWHLSTVVEGTLHDASTSSLSLAQALHPTPAVCGYPAEAARTFIQQHEGFDRNLFTGLVGWEDEFGDGEWAVTIRCSQVTDDKVTVYAGAGVVSGSEPERELRETQAKMRTMLNAMGLNEILEYSEEAYV

SEQ ID NO: 94047 - protein, 376 aa, Unknown
  misc_feature (1)..(376): tr|A0A3B0TNH7|A0A3B0TNH7_9ZZZZ Isochorismate synthase @ Menaquinone-specific isochorismate synthase OS=hydroth ermal vent metagenome OX=652676 GN=MNBD_BACTEROID01-231 8 PE=4 SV=1
MQKTAKSTKSVYEAISVCIKNNLTFAAYQLPQSKKPILIIQSTPGINKINDLSELRKIKGFLVSPFQKAECNPMFLIRPDYVYEGELKQAEFERLESTTRVYTNGNVCKRPKELSKTEYLLQIDKTINAIQENKFEKAVLSRVKFIQGDYSGKESEIFRLLCDSYPNAFVYIFRAGSQLWLGATPEPLACIDNGNFYTSSVAGTRSFNKGSLNITQWGNKERQEQHYVTDFIRGVLKSFQLNNYKQTGTYAKKAGNLLHLRTDFSFETAKIKGEVGRLVESLHPTSAVCGMPKKDTLKFITGIEKHYREYYSGYLGPVGMDGAISLFVNLRCMKVFKDALALYVGGGITTDSVPEEEWEETEIKAETLLSVIQKIY

SEQ ID NO: 94048 - protein, 482 aa, Hyella patelloides
  misc_feature (1)..(482): tr|A0A563VNM7|A0A563VNM7_9CYAN Isochorismate synthase f amily protein OS=Hyella patelloides LEGE 07179 OX=94573 4 GN=H1P_1780005 PE=4 SV=1
MTQSKISMPVISQENEFILDRLELDNFWHHRSFSFSVDESTKILSFVQKIPVVDPLAVLQQFAPTNTLRFYWENPSKQEAIAAWGITRNLTIESNARFAKTQSFIKSCFKQIISEGDTNINGSEARIFCSFSFFSQSELANKSHPAATIFLPRFQIAKKNKNHFFIVNFPLVNQQNLKQIKTQFSQKIQSIDWSRYEQLSTREREEVSWEERNLFSAQNSQYFKSTVRSALDSIAIDELSKIVIAHAVDIKSEKHFNVTDSLSNLRERHPDCYIFAIGNDRGQDFIGASPERLVSIQNKQLVTDALAGSAPRGKSTSEDVQWANILLKNRKEKREHQAVSDFILERLQDMGLKPHQLPLQLLQLSNIQHLWTPIYAHLPKGIDPLDIVAQLHPTPAVAGVPNKIVFDKIRHYEKFDRALYAAPLGWIDRRENCEFVVGIRSALIEKNRARLYAGAGIVSGSNPDKEFVEIQLKLQSLLKALV

SEQ ID NO: 94049 - protein, 480 aa, Ignavibacteria bacterium
  misc_feature (1)..(480): tr|A0A3M0WSR4|A0A3M0WSR4_9BACT Isochorismate synthase O S=Ignavibacteria bacterium OX=2053306 GN=D6830_04425 PE =4 SV=1
MIFKGLIKINAVNLEKTTENIDNGKITSEESLPITKKKIFRSVKKIEKVKFLNIVHNLTSTDEQYLYWNEPAFGFSFIAIGKCISIKSNGPDRIEETEKLISFLKDSIVSNEDEFNLTSLPLFLGGLKFAPNGNSELWKDFNDSEWFIPKTILLKYDKDYYQVTSVYSDDESELSTAEISFEQLNSLAANGYPEFKSAKIVDSNIDDNYEFEFWKDMINSALESIDNKQIHKVVLSREVQLLLDREPDIDILLKQLADRYPYCYIFAFRKNGSIFFGASPERLAKFSGGTVEADALAGSFPRGRTLEEDIQLEKELLSNEKNLNEQKAVVDFIKSSFSKFSVDITYPEEPIIRKLPNIQHLWTPIKAKINSDKPILSFLKEVHPTPAICGAPWSTAMSTILNKEKHSRGLFTGAIGWFNLKNEGEFAVAIRSALLKGKNVYAFAGCGIVQGSDPNTEFEETKLKLRPILNLFDYEEKDKS

SEQ ID NO: 94050 - protein, 455 aa, Ignavibacteriales bacterium
  misc_feature (1)..(455): tr|A0A419H7U8|A0A419H7U8_9BACT Isochorismate synthase O S=Ignavibacteriales bacterium OX=2049428 GN=C4517_04325 PE=4 SV=1
MHKFIQEILAFIGQTPIRDESLIRFTFKLEKVEIERLFELLSNEETLFFFSKPSGNRANLGVGKIESPFTEKLIETISKGNLEPNELIISANYDSSLMSKIPLVFGGEKFLPDKKENLWSDYPNQSWFIPQVLIASGIENTLIIFQFVGNNPNLKIFEKILDLLPLDTLVKTESATDYEILSATELEEWSRIINAGLDEITKHNIEKIVLARRMQLVLKSNFSISSFLSKLQTKYPECITFAYKENDSIFFGSTPEKLFTLDGNKIETEALAGSIARGANLNEDLVLESNLLNNQKDINEHNNVLSFLLSNLEDFSEKISYNPKPQIKKLQNIQHLQTPIKAMLKEGVDILELLRKLHPTPAVCGLPQKKAWELIEDLEYFDRGLYAGVVGWFNEKRKCEFSVGIRSAILKNNMLTAYAGCGIVEGSDPISEYHETELKFKPILSLLENEIINQP

SEQ ID NO: 94051 - protein, 402 aa, Indibacter alkaliphilus
  misc_feature (1)..(402): tr|S2EAF3|S2EAF3_9BACT Isochorismate synthase OS=Indiba cter alkaliphilus LW1 OX=1189612 GN=A33Q_0686 PE=4 SV=1
MNIETLSDRNTLTVTNYLKNLIALQLQQGNQFAIWRKPKSGFIQVLIDKTGKTKRVPLHLEELKPGFIVHPFEDQEDQKAFYLEANTYFKIDLNIPFEEQMEKIDQLPNLGNEPIKSDGLQKYFVPESATPWTKTSEECGKSGFIELVNKSLKAIKNGELSKIVPARIKKIRLNESFELVTAIKNLLEAYPNAFVNFFHIPGVGTWLGASPEILIQTKGDSFYTMSLAGTQKATGDNPLKNVAWTQKEIEEQALVSRYIVDCFKKIRLREYEEHGPKTVVAGNLLHLRSDFNVNMNSTNFPQLGSVMLELLHPTSAVCGMPRKEAFQFLRDHESFDRSIFAGFIGPVNVEDETSIYVNLRTARLLEGNAILYAGAGVTEDSDPEQEWEETEMKCEIIGKHLT

SEQ ID NO: 94052 - protein, 457 aa, Unknown
  misc_feature (1)..(457): tr|A0A2H9TAN2|A0A2H9TAN2_9ZZZZ Isochorismate synthase M enF OS=invertebrate metagenome OX=1711999 GN=menF PE=4 SV=1
MTKDTLWLAPLIKQLKGLSGQKFPHGFSCRVACSVDPVEMTHWLSIQNIPLKSFWRNRKGNLSIAGLGQAWEYRLHHRNDIAPCFRQISQLLKNNSTDLSPLQCLGFIAFSDQQQCTWESFGYGHFFLPAIELRKNTWGYQLACHLFYDNPQQWQTMINKRVEQLSHLDWSTTSKKHHSCALTPAGYIPDETQWQHLMTQSQQAFRDKQFRKVVLSRESRFSFDGTLSPWEILRRWHEANPYSYTYAFQETPGHVFFGCSPESLFHRRGLSITTEALAGTISRGTDRYTDQEKADYLLSDPKNITENRLVLDDIKQRLNPVCTHLKADKTHSLLKLKNLQHLRYLIRGRLIPDVKDEDLIRILHPTPAIGGLPREQAMAFIHREEPYARGLYAGICGIVGLNDTELNVSIRCARLAPGKLSLYSGAGIIPASRSLDEWEELDNKISTIRHILHTICT

SEQ ID NO: 94053 - protein, 398 aa, Iodobacter fluviatilis
  misc_feature (1)..(398): tr|A0A377SRJ7|A0A377SRJ7_9NEIS Isochorismate synthase d hbC OS=Iodobacter fluviatilis OX=537 GN=dhbC PE=4 SV=1
MNDLFRGELRTQAQYLLSGYQTDSAMFFASSRQTLLAQGHYATVPAANSLDALNQAVALALKQAKATGHLDPVVVGAIPFDGRKSACLSIPRSVLRAGPLPQSLAQPKPQAVPCSITPLPEPQAYADGVALAVQHLQNKDLDKVVLARALDLAAEQAVDIPKLLVTLAQRNAHGYTFAVNLSDQAEVQPRILIGASPELLLRKKGSQVFSNPLAGSAARSPDPKIDRERGEALLQSAKDLHEHAVVVNAVADGLRPFCRTLIVPERPVLMHTETMWHLSTEISGELIDEETTSLMLASALHPTPAVCGHPNQNARDLIAQIEPFDRGFYTGMLGWCDANGDGEWIVTIRCAEVAGKSLRLFAGAGIVADSSPQSELAETSAKFRTMLNAMGLVHAGAV

SEQ ID NO: 94054 - protein, 398 aa, Iodobacter sp.
  misc_feature (1)..(398): tr|A0A2G3JF77|A0A2G3JF77_9NEIS Isochorismate synthase O S=Iodobacter sp. BJB302 OX=1506510 GN=CSQ88_02690 PE=4 SV=1
MNDLFRGELRTQAQYLLLGYQTDSAMFFASSRQTLLAQGHYATVPAANSLDALNQAVALALKQAKATGHLDPVVVGAIPFDGRKSACLSIPRSVLRAGPLPQSLAQPKPQAVPCSITPLPEPQAYADGVALAVQHLQNKYLDKVVLARALDLAAEQVVDIPKLLVTLAQRNAHGYTFAVNLSGQTEAPPRILIGASPELLLRKKGSQVFSNPLAGSAARSPDPKIDRERGEALLQSAKDLHEHAVVVNAVAAGLRPFCRTLIVPERPVLMHTETMWHLSTEISGELIDEETTSLMLASALHPTPAVCGHPNQNARDLIAQIEPFDRGFYTGMLGWCDANGDGEWIVTIRCAEVAGKSLRLFAGAGIVADSSPQSELAETSAKFRTMLNAMGLVHAGAV

SEQ ID NO: 94055 - protein, 461 aa, Isoptericola dokdonensis
  misc_feature (1)..(461): tr|A0A161ILB8|A0A161ILB8_9MICO Salicylate biosynthesis isochorismate synthase OS=Isoptericola dokdonensis DS-3 OX=1300344 GN=pchA PE=4 SV=1
MVGAMSATPYPAPVPPSGASAGTPTAAPEAQHLVVRTVRIDSLPGGPTALVDLLPDARPLTWVRRGDGIVGWGEALRLDTFGPGRFADADAAWRALLARAVVRDEVRLPGTGPVAFGTFAFDDGPTGDAFDDERPQGTLVVPRVVVGRRGTVTWMTTTSVGPTLDAPGDAALAAAHRVPVTSPGRVTLVDGAVGSVDWPGVVAEAVDRIRSGALEKVVLARDVVATTEHPLDPRFLLGRLAEGYPSCWTFSVAGMVGATPELLVRSEKGLVTSRVLAGTIRREPGMTDDDSLLHAAQLARSSKDLEEHEFAVRSVADALEPFCSSMNVPDAPFVLHLPNVMHLASDVTGVLDPASRSGSLTLAAALHPSAAVCGTPTVAARDLIREIEGMDRARYAGPVGWVGADGDGEWGIALRSAELGDDPHHLRLFAGCGIVAASDPAAELAESEAKLVPMRWALGAD

SEQ ID NO: 94056 - protein, 465 aa, Isoptericola variabilis
  misc_feature (1)..(465): tr|F6FV93|F6FV93_ISOV2 Isochorismate synthase OS=Isopte ricola variabilis (strain 225) OX=743718 GN=Isova_0577 PE=4 SV=1
MSATPLPAPAPRPGEPAGTAEPLPLVVRTTRIDGLPDGPTALLDLLPDTRPLAWVRRGDGIVGWGEALRLETDGPGRFADAESAWQATLARAVVRDDVRLPGTGPVAFGTFAFDDDGGYEDHFTDDALRGRRAGTLVVPRVVVGRRGDVAWMTTIRPAGALDVAPGAAALARTRRTPVTGPGTVTFTDGAVAAQDWPALVGEAVDRIRAGELEKVVLARDVVATAEHPVDARHLLTRLADAYEACWTFSVGGMVGATPELLVRSEKGLVTSRVLAGTIRREPGMSDDDALLHAAQLARSSKDLEEHEYAVASVARALQHYCTSMNVPDAPFVLHLPNVMHLASDVTGVLDRSGLYNGGRPPSSLALAAALHPSAAVCGTPTVAARELIREIEGMDRSRYAGPVGWVGSDGDGEWGIALRSAELSDDDPRHVRLFAGCGIVAASDPAAELAESEAKLQPMRWALGS

SEQ ID NO: 94057 - protein, 390 aa, Izhakiella sp.
  misc_feature (1)..(390): tr|A0A4P8YIQ0|A0A4P8YIQ0_9ENTR Isochorismate synthase O S=Izhakiella sp. KSNA2 OX=2579935 GN=FEM41_12940 PE=4 S V=1
METIVAEERQQVVAVPATDGFFFMSPWKSLATSGHFASLELPAADGADPRGAFQRRLAQAFASARAAGIARPIAVGAIPFDTRKPSSLFIPEQVTTFSRANYQKRDPAAFCAPAVTGRKEIPEQPVFEEMVARAAYATSQPGIDKVVLSRLIDITTESAVDREALMQRLIALNPASYNFHVPLADGGALMGASPELLLRMNGNAFSSLPLAGSAKRVADPEQDKAVGQTLMNSRKDRHEHQLVTDAMRDVLAPRVSYLALPDRPELITTPQLWHLSTPIEGQVRDGRENALSLACLLHPTPALSGFPNDVAQRLIGELEPFDRELFGGIVGWCDDAGNGEWVVTIRCARLYEQQIRLFAGAGIVPDSSPTSEWNETGTKLSTMLNVFGLN

SEQ ID NO: 94058 - protein, 433 aa, Janibacter limosus
  misc_feature (1)..(433): tr|A0A4P6MYE3|A0A4P6MYE3_9MICO Isochorismate synthase O S=Janibacter limosus OX=53458 GN=EXU32_12660 PE=4 SV=1
MTSPSPVDVPHPLGSQHPALVVRTVAVPTARVGDLLALLPEPEDAGDIVSWVRKGEGFVGWGRVATFRATGVDRFEQAQSWWRGVTSEAIVRDDVDEPGTGPIAFGSMAYSRRSGTESVLVVPEVVVGRRGDLAWVTTTTTDSTVPPADEPLAAQPDPRDPGEVVFADRDLSTQGWAQAVEEAVARISTGTLDKVVLARAVQATAGHRIDPRWLLTRLAEDYDTTWVFAVDGLVGATPEMLVRLERGLVTSRVLAGTIRRTGDDSHDLALAGSLARSSKDLEEHEYAVRSVADALTAHTSSINVPETPFVLHLNNVMHLATDVAGVVRDGSTSLALAASLHPSAAVCGTPTMDADTVIAELEQMDRGRYAGPVGWMDASGDGEWGIALRCGWYESPQSLRLYAGCGIVAGSVAEDEVAESVAKLMPMRSALGG

SEQ ID NO: 94059 - protein, 441 aa, Janibacter melonis
  misc_feature (1)..(441): tr|A0A3M9JCC0|A0A3M9JCC0_9MICO Isochorismate synthase O S=Janibacter melonis OX=262209 GN=EEW87_09315 PE=4 SV=1
MTTLDPALARLDARTSPSSSPRLVCRTVRVPATRVGDLLALLPDDTSQVLSWVRRGEGLVGWGEVAGLSVTGEDRFGRAQDWWREITAVADVDDEVEVPGTGPICFGSMAYSARSQTPSRLVVPAVVVGRRGRDAWVTTTWLEGEKPSPVDDAVEISLRPSPAPRAPESIRFSDGDLSAGSWAGIVEQAVARISAGELDKVVLARSLDVEADSRIDPRWVLQRLAQDYDTTWVFSVAGLVGATPEMLVRLERGLVTSRVLAGTIRRTGDDSHDLALAGSLARSSKDLEEHEYAVRSVADALAAHTSSINVPESPFVLHLTNVMHLATDVAGVVDDTSTSLALAASLHPSAAVCGTPTPVADGLIGELEQMDRGRYAGPVGWMDATGDGEWGIALRCGAQTSPTSLRLYAGCGIVAGSDAASEVAESDAKFLPMRQALTPPA

SEQ ID NO: 94060 - protein, 423 aa, Janthinobacterium agaricidamnosum
  misc_feature (1)..(423): tr|W0V7X3|W0V7X3_9BURK Isochorismate synthase dhbC OS=J anthinobacterium agaricidamnosum NBRC 102515 = DSM 9628 OX=1349767 GN=dhbC PE=4 SV=1
MNDRLHHVFSEQASAADLLLHYQAGATFFASPRRSLLAHGVQAVLPPCAPGRIAAHAAAFLKDAAGGRATPAVLMGALPFCLDSSSAAPYLYLPRQLASGAGVDHAAAGPGLALGNPGARLPGAPLMQPTPQQYRANVRRALADIGAARFEKTVLSRSLTLDASIDLPVLLQRLAARNLRGYTFAINLAGAAIGQAGAPRTLIGASPELLLSRHGRALVSHPLAGSIPRSADPAEDRRRADGLLQSAKDLHEHALVVEAVAAAMRPYCKTLHVPAAPSLLSTATMWHLGTQVRGELADPATTSLEVALALHPTPAVCGHPAAPAASFIAEAEGFDRRYFAGLVGWCDSHGDGEWAVTLRCAEVGAAGATLYAGAGIVAGSEPQLELLETSAKLRTMLAAMNLELQLEDEPTGEQLYEHAKAVS

SEQ ID NO: 94061 - protein, 402 aa, Janthinobacterium sp.
  misc_feature (1)..(402): tr|A0A0S4K0J7|A0A0S4K0J7_9BURK Isochorismate synthase o f siderophore biosynthesis OS=Janthinobacterium sp. CG2 3_2 OX=1706231 GN=BN3177_2775 PE=4 SV=1
MNDRLHGHYLSRSSAADLCAHYEAGATLFSSPGHTLLAGGKRSILAPQSGSALAGAAASLLRTARRDGEALPVMIGAVPFLADAPAHLFIPEHVMMATGPANLPAANPQAPPARARFPRTIESIPTQDQYQRAVARAVERIRAGQLDKVVLSRSLTMETEIDVAGLLARLGARNAHGYTFAIDLAPDADGRRTLIGASPELLLSRHGTRVRCHPLAGSIPRSLDAHEDQRRAQGLLQSQKDLHEHALVADMVADSLRPYCHSVTVPAVPSLIATPTMWHLGSEVTAQLNEPGMSSLALAMALHPTPAVCGHPAALARSFINEAEGFDRGFFAGLVGWMDANGDGEWAVTLRCADVGAHSATLYAGAGIVAGSDPELEFLETSGKLRTMLRAMGLEAVLEEAA

SEQ ID NO: 94062 - protein, 373 aa, Jejuia pallidilutea
  misc_feature (1)..(373): tr|A0A090W603|A0A090W603_9FLAO Isochorismate synthase O S=Jejuia pallidilutea OX=504487 GN=JCM19301_3352 PE=4 S V=1
MVLDDFFKAVAQQYKNKLPFVIYRKPNTLDVKGMLQKDTALHITEDFKASGFVFAPFDDKFPAIILPVQYSKQILTTYKQSNLNTSYSSKTFNTYDKEKNFHINLVKKGINLIKKGELQKVVLSRKETVAFQNEDIFSIFQKLLATYTSAFVYCWYHPEIGLWLGATPETLLKIEDRNFSIMALAGTQNYNGTLNVVWQNKEIKEQQFVTDFILNNIKSRVENIKVSNVETVKAGNLLHLRTLIKGRLSSQNFNLKKLLYDLHPTPAVCGLPKALAKTFILENENYNRTFYTGFLGELNIEATVTPRTGKRNIENRAYALKRKSTQLYVNLRCMEINGNEAFIYVGGGITDTSNPESEWEETVSKSMVVKKVL

SEQ ID NO: 94063 - protein, 464 aa, Jeotgalibacillus alimentarius
  misc_feature (1)..(464): tr|A0A0C2VEH8|A0A0C2VEH8_9BACL Isochorismate synthase O S=Jeotgalibacillus alimentarius OX=135826 GN=KP77_24320 PE=4 SV=1
MRILHQSQGFTTFEQAVSRAEKSNRSVLYSKTMEIDTIDPLQFYEAGYSIFNGTRTFWQDPKSEAVFAGAGAARTFYIEDKNRFDALSNQWNAFLKDAVIDNESSVGGPVILGGFSFDPEKDKSHEWSSFKQGYFQLPAFMLTVNQYGHAFLTMNIVCNKGENAVSVWNRMQQQKEALLNKSVSTLQDVNVVSIKEYEPDEWRSSITSVVQRIDNKELEKVVLARKVKVQFDDKKRSDSVLEKLRDDQSESFIFSFEAGDSCFIGATPERLIKKNHNKVLSTCLAGSIARGNTMEEDQQLGHELLNDQKNLGEHEIVVRMISKSLEDLCHQLTVPKQPVLMKMRDIQHLYTPVEGETDRASILEFVKELHPTPALGGTPTHKAMEMIREEEEMDRGFYAAPVGWLNAAGDGEFAVAIRSGLLSGEKAYLYAGCGVVRDSDAESEYQETLIKLRPMVRAVGGTIS

SEQ ID NO: 94064 - protein, 468 aa, Jeotgalibacillus campisalis
  misc_feature (1)..(468): tr|A0A0C2RV12|A0A0C2RV12_9BACL Isochorismate synthase O S=Jeotgalibacillus campisalis OX=220754 GN=KR50_31360 P E=4 SV=1
MVRILQQSHGLAAFERAISLAHQSKREVLFSQVTLIDEVDPLQFYEAGYKLYQGERSFWQDRTGELTLVGAGNAQTFTSNKKNERFIDIKKQWNEFLLEAVRTGENHAGTGPVAVGGFSFDPRQEAELEWTNFSNGYFQLPSFMLTVNAKGDCFLTSNIVCSEFDDSKKLWERMQEERNQLLSDTEESMKDVSVIKTTEIEPVKWKTSLTSVVKRLKKGEMEKVVLARKILVDFDGKKRSDTVLERLRDDQSASFIFSLEVLDSCFIGATPERLVKKSDEHILSTCLAGSIARGATLEEDQHLSDLLLNDEKNLHEHELVVRMITENLKDLCREVTVPSSPALMKIRDIQHLYTPVKGIAQKGMSVVDFVDRLHPTPALGGTPTHLAMDVIQKEEKMNRGFYAAPVGWMDAEGNGEFAVAIRSGLLHDRHAYLYAGCGVVKDSNAESEYQETLIKFRPMLRAVGGTMQ

SEQ ID NO: 94065 - protein, 464 aa, Jeotgalibacillus malaysiensis
  misc_feature (1)..(464): tr|A0A0B5AV52|A0A0B5AV52_9BACL Isochorismate synthase O S=Jeotgalibacillus malaysiensis OX=1508404 GN=JMA_25520 PE=4 SV=1
MRILHQSQGFTTFEQAYEMAEKSNQPVLYSKTMEVESIDPLQFYEAGYSIFNGSRSFWQDPKSELVFAGAGSAKTFYIKEEERFDSLSVQWKSYLKNAVIEKGKAWTGPVILGGFSFDPKKKKSVEWSAFEQGYFQLPAFMLTVDQYGKTFLTMNVECKKGDHAVQVWNQMQKQKTALLNKSVSSLKDVNVLAIKEFDPEEWKSSLTSVVGQISRGEVEKVVLARKVKVTFDDQKRSDSVLEKLRDDQSESFIFSFESGDSCFIGATPERLIKKHQQQVLSTCLAGSIARGKTVEEDQQFGNELLNDEKNLGEHEIVVRMISKSLEDLCSELTVPDQPVLMKMRDIQHLYTPVEGMTARSSILEFVKELHPTPALGGTPTSEAMQIIREEEEMDRGFYAAPVGWLNAEGDGEFAVAIRSGLLSGKHAYLYAGCGVVKDSDAEGEYQETLIKLRPMVRAVGGTIS

SEQ ID NO: 94066 - protein, 398 aa, Jeotgalibacillus marinus
  misc_feature (1)..(398): tr|A0A0M0KTK7|A0A0M0KTK7_9BACL Isochorismate synthase O S=Jeotgalibacillus marinus OX=86667 GN=AMC98_14085 PE=4 SV=1
MLEQNVISQTKAEHLLHEYQPGAFFLASPHRVLLAKGICEIVPEADGQNQIKTLSGRIAETLNQAKQSGQSRPLVVGAVPFDHVKAARLVVPEDVRWSGPLQFDHAEKEQQPEHTYHIEPVPAPEGYKNGVEQGLARIADGTLSKIVLSRSLHLTSSEPIQTDELLRHLAQHNTHGYTFAADVSSEAETPSRRTLLGASPELLVSRMGTQVVSNPLAGSRPRSNDPAEDQRRADELLSSAKDLHEHAVVADAVAAALRPFCRTLDVPEKPSLIKTETMWHLSSVIKGELSDPSVTALELAAALHPTPAVCGTPTDLAREAIHSIEPFDRGFFTGMVGWCDNAGDGEWIVTIRCAEAEERSLRLYAGAGVVAGSKPEDELQETSAKFRTMLRAMGVNHI

SEQ ID NO: 94067 - protein, 464 aa, Jeotgalibacillus salarius
  misc_feature (1)..(464): tr|A0A4Y8L841|A0A4Y8L841_9BACL Isochorismate synthase O S=Jeotgalibacillus salarius OX=546023 GN=E2626_15830 PE =4 SV=1
MRILHQSQGFTTFEQAFEIAEKSNQPVLYSKTMEIEAIDPLQFYEAGYSIFNGERSYWQDPKSECTYAGAGSAKTFHIKETDRFNALSEQWKRFLKDAVIEKGAVWTGPVILGGFSFDPEKNKGAEWGSFNQGHFQLPAFMLTVDQYGKSFLTVNVVCNKGEHAVTVWNQMQKQKAALLNKTVNSLKDVNVLSIKECQPLEWKSSLTAVVERINRDELEKVVLARKVKVEFDDRKRSDSILEKLRDDQSESFIFSFEAGESCFIGATPERLIKKYKNKVLSTCLAGSIARGKTMNEDQEFGKELLSDEKNLGEHEIVVRMISQSLEDLCSHLSVPDQPVLMKMRDIQHLYTPVEGITERDSILEFVKKLHPTPALGGTPTHKAMEIIREEEEMDRGFYAAPVGWLNAEGDGEFAVAIRSGLLSGKHAYLYAGCGVVKDSDAESEYQETLIKLRPMVRAVGGTIS

SEQ ID NO: 94068 - protein, 468 aa, Jeotgalibacillus soli
  misc_feature (1)..(468): tr|A0A0C2V4J4|A0A0C2V4J4_9BACL Isochorismate synthase O S=Jeotgalibacillus soli OX=889306 GN=KP78_37760 PE=4 SV =1
MVRIIQQSHGYAAFEHAFEKAYQFKRDVLFSMVIPIDPVDPLQFYEAGYQMFQGERSFWQDRDGELALIGVGNAQTFTSNPLNDRFTTIQQQWSQFLEHAVYFGVQKIGTGPIIMGGFSFDPRQEAELEWSNFSDGYFQLPSYMLTIDQYGAAFLTTNIICSEGDHAKTIWARIQANKELLFTRLQDHIKDANVVQTIEVNPERWKNTIGFVVKRLQKEEMEKVVLARKIKVEFDGKKRSDTVLERLRDDQPDSFIFSLEVLDSCFIGATPERLVKKENESILSTCLAGSIQRGNTTEEDNRLGQLLLHDEKNLHEHQLVVNMIKSSLTDLCEVVHVPSQPALMKIRDIQHLYTPVKGIASKGISILDYVRNLHPTPALGGTPTHLAMDVIREEEGMNRGFYAAPVGWLDAQGNGEFAVAIRSGLLHDHHAYLYAGCGVVADSDPESEYQETTIKFRPMLRAVGGTIK

SEQ ID NO: 94069 - protein, 468 aa, Jeotgalibacillus sp.
  misc_feature (1)..(468): tr|A0A4R5XTB6|A0A4R5XTB6_9BACL Isochorismate synthase O S=Jeotgalibacillus sp. S-D1 OX=2552189 GN=E2R51_00125 P E=4 SV=1
MVRILQQSHGFAGFERAFEQAQQSKRDVLFSMVTPIDSVDPLQFYESGFKLYQGERSFWQDRNKDLVLVGVGNAKTFTSNERDHRFMDIKNQWTTFLADAIQVGDKILGTGPLVMGGFSFDPRQEAELEWTNFSHGHFQLPSFMLTNDRQQGSFLTVNIVCTASDNPKKIWDRMQLEKNNLFETFNQQIEDVNVIRTTEIQPDQWKKTLTSVVKRLNKGEMEKVVLARKIKVDFDGKKRSDTVLERLRDDQTNSFIFSLEVLDSCFIGATPERLVNQSNRSILSTCLAGSIERGETIEEDERLSRLLLNDEKNLHEHDLVVKMISQNLRALCSEIEVPNGPALMKIRDIQHLFTPVKGTANNGMTILDFVDRLHPTPALGGTPTHLAMDVIQEEERMNRGFYAAPVGWMDAEGNGEFAVAIRSGLLHDQHAFLYAGCGVVKDSNADSEYQETLIKFRPMLRAVGGTMQ

SEQ ID NO: 94070 - protein, 464 aa, Jeotgalicoccus nanhaiensis
  misc_feature (1)..(464): tr|A0A4Y9HIM9|A0A4Y9HIM9_9STAP Isochorismate synthase O S=Jeotgalicoccus nanhaiensis OX=568603 GN=E4T89_09480 P E=4 SV=1
MKLQSSRIFIESISLDSDRQYLTLHIPMDEYNIDEEKIFTYFDESKGSRYWFKSKDNTYNVVGINYIESMWRDKFQPESAADSKKTLFAKLQQEKLGDNLKSKLSLFGGTLFDDKDTTDEWNDFKMIEFHLPEWQFDLNNHEVFLTREKTELNMDDVLDEVDGVLSAIENTVITEKEKPVVKSKRDIFPNEWKMLVEEAVNNLNDEFKKVVLARQKLITFESRAKRLYLIRRLKDEADTYTIYYEKGKSTFVSKTPEKLFSIRGEELVTNAIAGSIQRVEDSRENDLQKDFLLNDEKNLFEHRVVRESIVSDIVPFSEGLNYKKNPLLLENKYIYHLFTPIQAMLKKDADEFKILKRIHPTPAVGGLPKKLAKDYIKDHEYGTRGLYAAPLGIIHEDKECEFAVGLRSMLISARSATLFAGCGIVKGSDPEAEFLETEVKFTPMLNVLEATTNELYGSTNDTNI

SEQ ID NO: 94071 - protein, 416 aa, Jiangella sp.
  misc_feature (1)..(416): tr|A0A4R5A004|A0A4R5A004_9ACTN Isochorismate synthase O S=Jiangella sp. 8K307 OX=2530373 GN=E1262_28895 PE=4 SV =1
MVVTTLPASAPMVVRTTEVPDPGPLLELLPEDFPMAWVRQGEGVVGWGQAARFDTIGANRFVAADRWWRRMVGTAVVRDEVRLPGSGPVAFGSFAFDDVPGSSSLVLPDTVVGHRSGRWWVTTIDVTGNLPGGAALPDVSRARRPAAVAYADGAHSGTEWEAIVAEAVRRITAGELEKVVLARDLIAESPEPIDLRWPLQRLSDGYPHCWTFSVDGMIGATPELLVRRERGLVTSRVLAGTIRRTGDDEHDLALAASLARSSKDLEEHEYAVRSVADALAPFCSSMNVPESPFVLHLPNVMHLATDLAGVTDSDASSLALAAALHPSAAVGGTPTAVALDVIREIEGLDRARYAGPVGWMDGRGDGEWGIALRSAEVSGSRLRLFAGCGIVAGSDPAAELAESVAKLVPMRDALSS

SEQ ID NO: 94072 - protein, 392 aa, Kalamiella piersonii
  misc_feature (1)..(392): tr|A0A3A9IPT7|A0A3A9IPT7_9GAMM Isochorismate synthase O S=Kalamiella piersonii OX=2364647 GN=D7S44_12730 PE=4 S V=1
MVETLTFGNPQLQDFSALCRGFIFTSPWRSIATQGCYTTVTTPVTDGDALNGDFQQQLRRHFAAAKKQGIAHPILVGAIPFDVTQPAALFIPESHQTFDRADLQGALTAVQAPLPQVRRRAAVPEHDAFTAMVAQAVMATQRGELDKVVLSRLMDIVTEQPVDIAALMQRIVAQNPDSYHFHLPLPQGGSLVGASPELMLRKEGRDFSSCPLAGSARRDAVAARDRAAGDALMQSAKDRHEHKLVTDAMREVLQPRSRLLSVPATPSLLTTATLWHLATQIDGEALDEQENALSLACLLHPTPALSGFPHQRAQQLIQTLEPFDRRLFGGIVGWCDDQGNGEWVVTIRCGTVQGARVRLFAGAGIVADSQPESEWRETGVKLDTMLRAFGLQ

SEQ ID NO: 94073 - protein, 408 aa, Kangiellaceae bacterium
  misc_feature (1)..(408): tr|A0A2E2VR49|A0A2E2VR49_9GAMM Isochorismate synthase O S=Kangiellaceae bacterium OX=2026751 GN=CMF25_05125 PE= 4 SV=1
MRDTTFVDSTLNGSNGSSAHAALLHASPRLLEQYQPESSVYFASPERALLAMPPFASLLVAGMQDLSQQASESLKLARDLGFERPIVVGALPFNTNEKPLLRVSIQSEWEETPVKPQLTAVKAVDAESISAYPAPEHYMAGVKDALTRFARGELDKVVLSRTLEVSCKQRPDVKALLNNLAAKNHHGYTFAVDFPAEDGQSKPATLIGASPELLLSHRGNKIIANPLAGSEPRSSDPQEDRQRAQQLLASQKDRYEHAIVIEAVAEALRPFCRDLDIPEQPELIQTETMWHLSTVIEGELKNTDTSSLELALAMHPTPAVCGFPKAEAQQAIKDIEPHQRGLFTGMVGWCDSAGDGEWVVTIRCAQIQDCAIRLYAGAGVVAGSCPEKELAETGAKFNTMLQAMGVCI

SEQ ID NO: 94074 - protein, 411 aa, Ketobacter sp.
  misc_feature (1)..(411): tr|A0A3L8BLH8|A0A3L8BLH8_9GAMM Isochorismate synthase O S=Ketobacter sp. OX=2083498 GN=D9N14_12455 PE=4 SV=1
MPVIDEGPHMTSHLPSHLYFAATLYDHLLRYHRGDFVFSSPRQSIMASGIALEDWAGGHAEILERADQLLARAREQGWRRALLMSAIGFDVSAPSRLVIPRYVEAMPQLDHSAIPSAPVSSVRRDQPAQLTAMTPTPQAYQDLVSKAVRSIREGEFEKVVLSRSLSVQARIDLAALLATLAQRNPAGYTFAFDRQHQGQQRTLVGASPELLLSKCGPHILSNPLAGSLPRSHSVAENQRRANELMHSEKDRYEHALVVDAVATALAPFCKQLSVPPEPSVLETPTMLHLSTAISGELHGADTSSLALALALHPTPAVCGHPRQPAHHFIQQQEGFDRSLFTGLVGWCGQDGNGEWAVTIRCADVGDDDATLYAGAGIVEGSQPDKELTETSAKMGTMLAAMGLESLMEASL

SEQ ID NO: 94075 - protein, 372 aa, Kibdelosporangium phytohabitans
  misc_feature (1)..(372): tr|A0A0N9IEB7|A0A0N9IEB7_9PSEU Isochorismate synthase O S=Kibdelosporangium phytohabitans OX=860235 GN=AOZ06_18 265 PE=4 SV=1
MHADVTAAAPAELLSDYQPGAFFLSSPAGVVLADEPSAVHTTIAAATQALQAAGGVLAGAIPFARTAPARLGLYSSVRHGQPWHMATPTLSPLDRPDFSGADDSRDVYVAGVRAALERIQSAELSKVVLARVLDLRSDRPVLTGKLLERLVARDPYGYTFATDVGAGSLVGASPELLVSRRAGLVTANPLAGSAPRHADPVQDGRNATGLLVSEKDRHEHEVVVKAVAAGLAPLCARVVVPPTPELLPTRTMWHLSTLIEAEPLPGVSALDLAIALHPTPAVCGTPTEPARALIGELEPFDRGFYTGLVGWTDAAGDGEWAIALRCGVVDGTSLRLYAGAGIVAGSDPDKELAETTAKFRTFLNAIGLGDLT

SEQ ID NO: 94076 - protein, 370 aa, Kibdelosporangium sp.
  misc_feature (1)..(370): tr|A0A0K3BAV4|A0A0K3BAV4_9PSEU Isochorismate synthase o f siderophore biosynthesis OS=Kibdelosporangium sp. MJ1 26-NF4 OX=703222 PE=4 SV=1
MELTDQYRPGAFFFATPERTLLADEPRHVLSEKDTDALSVQVNDALTEFGGIAVGALPYDHTGEAHVLLPTSVSWSGPSRPARHQAMVLPGHQVTPEPEPSEYERQVARALTLLDDSPLGKVVLARTLRIDLDEPIDMRRMLASLAAMNTHGYTLAAPLPTPGVTLVSASPELLVRRTGMKFVSRPLAGSQPRGKDPVTDRDNAQRLLASRKDHDEHRWVVEAEVEALRPFCGRLDVPRAPSLLSTPSMWHLATKITGELADRDVTALTLAAALHPTPAVCGSPTDAARAAIAQIESFDRGFYSGAVGWVDANGDGEWAVAIRSADVTDHWLRLYAGAGIVHGSVPSLELAETSAKFQTLLRGMGLDLTL

SEQ ID NO: 94077 - protein, 401 aa, Kitasatospora aureofaciens
  misc_feature (1)..(401): tr|A0A0L8P6S1|A0A0L8P6S1_KITAU Isochorismate synthase O S=Kitasatospora aureofaciens OX=1894 GN=ADK78_27680 PE= 4 SV=1
MPTAPEVATHVPLAEPAHPAVGAATALLDAYTPGARFLGTPTRTLLGQGTHSEVPHDERPLPQRVAATLDAARADGHGAPFVVGAVPFDQSAPAALTVPGSVRTAPPLTADPLIALPADPPAAAAWDIRPVPEPEVYGAGVAAAVERMWRGEFSKVVLARTLELTTPDPLDIPAMLQRLARRDPSGYTFALPTAPGRTLLGASPELLVSRRGDRVVANPLAGSTPRSDDLAEDVRRAAALLESAKDLHEHAVVVDAVHRALAPYCTDLTVPARPTLLRTATMWHLSTTVTGTLAAPDTSALELACALHPTPAVCGTPTDTARQVITDTEPFDRGFFTGMVGWGDASGDGEWVVTIRCAEAEERSLRLYAGAGVVAASEPAAETAETGAKFRTFLSAVGAEL

SEQ ID NO: 94078 - protein, 387 aa, Kitasatospora cheerisanensis
  misc_feature (1)..(387): tr|A0A066Z1E7|A0A066Z1E7_9ACTN Isochorismate synthase O S=Kitasatospora cheerisanensis KCTC 2395 OX=1348663 GN= KCH_06110 PE=4 SV=1
MTTASELRPPAAATGSDLLAAYRPGPDRALLATPTRTLLAEGVHRLVDDPSTAARALAGARPDGGRRLLVGAIPFAPDAPARLFVPERVRTAGPVPAGGSAAPVASPGWRSRPVPEPDGYRSAVAEAVRRLAGDSPLEKVVLARTLELTSPGGADLAAMASRLVHRDPYGYTFAVPAGGSATLIGASPELLVSRRGERVVSNPLAGSAARSADPVEDLRRAEELLHSEKDLAEHAFVADAVRAALAPYCAELIVPERPTLLRTAAMWHLSSTVTGILREPSTSALELALALHPTPAVCGTPTDRARAAIGELEPFDRGLYTGVVGWGDAAGDGEWVVTLRCAEADGDRLRLFAGAGVVAASDPELELAETSAKFRTFLHVLGLEDAR

SEQ ID NO: 94079 - protein, 431 aa, Klebsiella aerogenes
  misc_feature (1)..(431): tr|A0A0H3FZE9|A0A0H3FZE9_KLEAK Isochorismate synthase M enF OS=Klebsiella aerogenes (strain ATCC 13048 / DSM 30 053 / JCM 1235 / KCTC 2190 / NBRC 13534 / NCIMB 10102 / NCTC 10006) OX=1028307 GN=menF PE=3 SV=1
MLSVSTALESLLGCLAEDFPPSPGTRIFDIPFPLNDAFDPLLWCAHQPCWPQFYWQQRNGDEELAALGAVTTFASLSAAHDFLCAQGREDLRISGLNAFDPQQGHLFLPRLEWRRLGGKATLRLVVHSVTSLQDDAAAARAFLQSLNSEQATAVSMPPLQSEQHAPEYPQWRELITQATQAIGAGEMDKVVLARVTDLRFSAPLQAFAIMAASRRSNLNCFHFLMAFSPQQAFLGSTPERLWRRRGALLRTEALAGTVANHHDDARAQQLADWLMKDDKNQRENMLVVEDICQRLQGESPTLDVLPPQVVRLRKVQHLRRCIWCELAEPDDSRCLLQLQPTAAVAGLPRQAALAFIRRHEPFTREWYAGSAGYLSLAQSEFCVALRSAKVENDTLRLYAGAGIVSGSDPQQEWQEIENKAAGLRTLLLSET

SEQ ID NO: 94080 - protein, 391 aa, Klebsiella grimontii
  misc_feature (1)..(391): tr|A0A285B0F6|A0A285B0F6_9ENTR Isochorismate synthase 1 OS=Klebsiella grimontii OX=2058152 GN=entC PE=4 SV=1
METSLAEEVREKKMTLPPESFFFMSPYRSFTTAGCFSRFSHPAADGDDPDGEFQQKMAAAFKAARTAGIARPVMVGAIPFDTSEPSELFIPASWTAFSRTEKQHSARYASGQNPMDVVQRREIPEQDTFMAMVARAAALTATPEVDKVVLSRLIDITTRERVDSGALLERLIAQNPASFNFHVPLSDGGVLLGASPELLLRKEGAHFSSLPLAGSARRQPDDVLDREAGHRLLASEKDRHEHELVTQAMKAVLAPRSSELSLPDSPQLITTPTLWHLATQIQGTALANENAMSLACLLHPTPALSGFPHQAAKRLIGELEPFDRQLFGGIVGWCDDEGNGEWVVTIRCARLQQRTLRLFAGAGIVPASSPLGEWRETGVKLTTMLNVFGLQ

SEQ ID NO: 94081 - protein, 391 aa, Klebsiella michiganensis
  misc_feature (1)..(391): tr|A0A0J2I5G1|A0A0J2I5G1_9ENTR Isochorismate synthase E ntC OS=Klebsiella michiganensis OX=1134687 GN=entC PE=4 SV=1
METSLAEEVREKKMTLPPESFFFMSPYRSFTTAGCFSRFSHPAADGDNPDGEFQQKIAASFKAARAAGIAKPVMVGAIPFDTSEPSELFIPASWAAFSRTEKQHSARYASGQQPMDVVQRREIPEQDTFMAMVARAAALTATPEVDKVVLSRLIDITTRERVDSGALLERLIAQNPASYNFHVPLSDGGVLLGASPELLLRKEGAHFSSLPLAGSARRQPDDVLDREAGHRLLASEKDRHEHELVTQAMKAVLAPRSSELSLPDSPQLITTPTLWHLATQIQGTALANENAMSLACLLHPTPALSGFPHQAAKRLINELEPFDRQLFGGIVGWCDDEGNGEWVVTIRCARLQQRTLRLFAGAGIVPASSPLGEWRETGVKLTTMLNVFGLQ

SEQ ID NO: 94082 - protein, 431 aa, Klebsiella oxytoca
  misc_feature (1)..(431): tr|A0A0G3S9T6|A0A0G3S9T6_KLEOX Isochorismate synthase M enF OS=Klebsiella oxytoca OX=571 GN=menF PE=3 SV=1
MLSVSTALESLYRCLDEAFPPSPGTRIFDVPFALNDAFDPLLWCTHQPQWPQFYWQQRSGDEELAALGAVQIFASLEQAHAFLRQQGREDLRICGLNAFHPQQGLLILPRLEWRRLGGSATLRLVLYSETSLRDDARAAREFLDSLVAKQAQATAVPSLLSEQHFPAYPQWRELIAQATQAIAAGEMDKVVLARATDLHFAAPLNAGAIMAASRRSNLNCFHFLMVFNAQEAFMGSTPERLWRRRGALLRTEALAGTVASHADDRQAQRLGNWLMADDKNQRENMLVVEDICQRMQGETRALEVLPPQIVRLRKVQHLRRCIWAELEKPDDARCLHQLQPTAAVAGLPRRVALDFITRNELFTRGWYAGSAGYLSLAQSEFCVSLRSAKIEQRTLRLYAGAGIVSGSDPEQEWQEIENKAAGLRSLLLSEV

SEQ ID NO: 94083 - protein, 118 aa, Klebsiella pneumoniae
  misc_feature (1)..(118): tr|A0A378CR51|A0A378CR51_KLEPR Menaquinone-specific iso chorismate synthase OS=Klebsiella pneumoniae subsp. rhi noscleromatis OX=39831 GN=menF_2 PE=4 SV=1
MIARAAKAISAGEMDKVVLARATDLQFAAPLDAVSIMAASRRSNLNCFHFLMAFNARQAFFGSTPERLWRRRGALLRTEALAGTVANHQEDAKAQQLADWLMKDDKNQRENMLVVEDI

SEQ ID NO: 94084 - protein, 429 aa, Klebsiella quasipneumoniae
  misc_feature (1)..(429): tr|A0A2Z3FAN7|A0A2Z3FAN7_9ENTR Isochorismate synthase M enF OS=Klebsiella quasipneumoniae OX=1463165 GN=menF PE =3 SV=1
MLSVSTALARIRDGLSEPFPDSPGTRIIDIAFPLNDAFDPLLWCGQQPQWPQFYWQQRNGDEELAALGAVKSFPSLDAANRFLHQAGRQDLRICGLNAFAPQQGRLVLPRLEWRRCGGRAVMRLVLHSDLSLRDDAVTAGDFLASLTTAQATPGGVPPLLSERHSSDYPQWQAMIDQATQAIAAGDMDKVVLARATDLQFAAPLDAVSIMAASRSRNLNCFHFLMAFNARQAFFGSTPERLWRRRGALLRTEALAGTVANHQDDAKAQQLADWLMKDDKNQRENMLVVEDICQRLQSEASTLDVLPPQVVRLRKVQHLRRCIWTELAEPDDSRCLLQLQPTAAVAGLPRRAALAFIQRHEPFSREWYAGSAGYLSLAQSEFCVALRSAKVDNDTLRLYAGAGIVSGSDAQEEWQEIDNKAAGLRSLLCP

SEQ ID NO: 94085 - protein, 391 aa, Klebsiella quasivariicola
  misc_feature (1)..(391): tr|A0A556VHL9|A0A556VHL9_9ENTR Isochorismate synthase E ntC OS=Klebsiella quasivariicola OX=2026240 GN=entC PE= 4 SV=1
METSLAEDVQKHTQTLSPDSFFFMSPYRSFTTSGCFRRFSQPAVGGDALNGEFQQQMAAAFAEARAAGIRKPVMVGAIPFDTCQPSELYIPERWEAFSRPEKQRSARYAAPLEAMEVVERREIPEQDEFLAMVERAAALTATPEVDKVVLSRLIDITTRDRVDSGALMERLIAQNPASFNFHVPLSDGGVLLGASPELLLRKEGQRFSSLPLAGSARRQPDDVLDREAGNKLLASGKDRHEHELVTQAMKSVLGPRSSQLSLPESPQLITTPTLWHLATPIEGTALAEENAMSLACLLHPTPALSGFPHQAAKRLIAELEPFDRQLFGGIVGWCDDEGNGEWVVTIRCARLQQRTLRLFAGAGIVPASSPLGEWRETGVKLTTMLNVFGLN

SEQ ID NO: 94086 - protein, 431 aa, Klebsiella sp.
  misc_feature (1)..(431): tr|A0A564JSJ4|A0A564JSJ4_9ENTR Isochorismate synthase M enF OS=Klebsiella sp. WCHKl090001 OX=2153354 GN=menF PE =3 SV=1
MLSVSTALESLSGCLAEDFPPSPGTRIFDIPFVLNDAFDPLLWCCHQPHWPQFYWQQRNGDEELAALGAVKTFSSLSQAHAFLQRQGRDDLRICGLNAFDPQRGMLILPRLEWHRLGGNATLRLVLCSDTSLCDDARAAREFLRLLTTEQAQTTAIPYLHSEQHFPAYPQWRELIMQATQAIAAGEMDKVVLSRATDLHFAALLNAGSIMAASRRSNLNCFHYLMAFTSQEAFLGSTPERLWRRRGALLRTEALAGTVASHEDECQAQRLGDWLMSDDKNQRENMLVVEDICQRMQGETRALEVLPPQIVRLRKVQHLRRCIWAALDKPDDARCLHRLQPTAAVAGLPRQTALDFITRHEPFTRDWYAGSAGYLSLAQSEFCVSLRSAQVEQNKLRLYAGAGIVSGSDPEQEWLEIDNKAAGLRSLLLAET

SEQ ID NO: 94087 - protein, 429 aa, Klebsiella variicola
  misc_feature (1)..(429): tr|A0A5D1Y7T1|A0A5D1Y7T1_KLEVA Isochorismate synthase M enF OS=Klebsiella variicola OX=244366 GN=menF PE=3 SV=1
MLSVSTALARLQDGLGESFPDSPGTRIIDIAFPLNDTFDPLLWCGQQAQWPQFYWQQRNGDEELATLGAVKTFSSLDAANRFLCQTGRQDLRICGLNAFEPQQGSLVLPRLEWRRCGGRAVLRLVLHSDISLREDAATARAFLASLTTTQATPGAIPRLLSERHSSDYPQWQAMIARATKAISAGEMDKVVLARATDLQFAAPLDAVSIMAASRRSNLNCFHFLMAFNARQAFFGSTPERLWRRRGALLRTEALAGTVANHQEDAKAQQLADWLMKDDKNQRENMLVVEDICQRLQSEASTLDVLPPQVVRLRKVQHLRRCIWTELAAPDDSRCLLQLQPTAAVAGLPRRAALAFIQRHEPFAREWYAGSAGYLSLAQSEFCVALRSAKVDHDTLRLYAGAGIVSGSDAQQEWQEIDNKAAGLRSLLCP

SEQ ID NO: 94088 - protein, 393 aa, Kluyvera ascorbata
  misc_feature (1)..(393): tr|A0A378GKB4|A0A378GKB4_9ENTR Isochorismate synthase e ntC OS=Kluyvera ascorbata OX=51288 GN=entC PE=4 SV=1
METSLAADEQEQHHHAAVSADNFFFMSPYRSFTTSGCFQRFTCPAEGGDAPDSAFQQGLASAFAEAKAAGIANPVMVGAIPFDTTQPSALFIPERCEAFVRTAKQHSSRYHASREPLSVVARQEIPESPVFLDMVARAAELTATPQVNKVVLSRLIDIEAEQALDSGALLERLVAQNPASFNFHVPLPDGGVLLGASPELLLRKEGAMFHSLPLAGSARRQPDDMLDREAGNRLLASEKDRHEHELVTQSMKKTLAPRSLQLTLPSTPQLITTPTLWHLATPIEGQAKAEENALTLACLLHPTPALSGFPHEAAKQLIAELEPFERDLFGGIVGWCDAEGNGEWVVTIRCARVKANSVRLFAGAGIVPASSPESEWRETGVKLSTMLNVFGLH

SEQ ID NO: 94089 - protein, 393 aa, Kluyvera cryocrescens
  misc_feature (1)..(393): tr|A0A2X3GE14|A0A2X3GE14_KLUCR Isochorismate synthase e ntC OS=Kluyvera cryocrescens OX=580 GN=entC PE=4 SV=1
METSLAAETQQQQHQATIAADSFFFMSPFRSFTTSGCFTRFTCPAEGGDSPDSAFQQGLASAFAAAKAAGIDNPVMVGAIPFDTRLPSALFIPERCETFSRTAKQKSSRYSASREPMAVTARQEIPEHPVFLDMVAQAAALTATPQVDKVVLSRLIDITAEQTLDSGALLERLVAQNPASFNFHVPLPDGGVLLGASPELLLRKEGDHYSSLPLAGSARRQPDDVLDREAGNRLLASEKDRHEHELVTQSMKQTLAPRSLQLTLPQTPQLVNTPTLWHLATPIEGQAKAEENALSLACLLHPTPALSGFPHQVAKQVIAELEPFERDLFGGIVGWCDSEGNGEWVVTIRCARVKDNGVRLFAGAGIVPASSPESEWRETGVKLSTMLNVFGLH

SEQ ID NO: 94090 - protein, 430 aa, Kluyvera georgiana
  misc_feature (1)..(430): tr|A0A1B7K333|A0A1B7K333_9ENTR Isochorismate synthase M enF OS=Kluyvera georgiana ATCC 51603 OX=1354264 GN=menF PE=3 SV=1
MRSILAALQRLSALLADDFPALPGMRILEAAFPLNDAFDPLAWLNGQAVWPQFYWQQRSGKEEIAALDTVCTFSSLAQANAFLATLPRDDIRVCGVNAFEPTRGTLFLPRLEWRREAGRATLRLNLWSETSLAQDAERARACLAALSAHHSSAELSLHQESETHRPGKEGWCRLIQQATQAIRDGEFTKVVLARATDLTFSHAPDAGALMTASRRVNFSCYHFYMAFDARRAFLGSSPERLWRRRGVQLLTEALAGTVAAHDDPVIAQRLGDWLMHDDKNQRENGLVVDDICQRLQDVTHALDVLPAEIVRLRKVQHLRRRIQAELTQPDDTLCLLQLQPTAAVAGLPRAAALAFIDHFEPFTREEYAGSAGYLSRQQSEFCVALRSARVQDKTVRLYAGAGIVEGSDPEQEWQEIENKAAGLRSLLFSE

SEQ ID NO: 94091 - protein, 432 aa, Kluyvera intermedia
  misc_feature (1)..(432): tr|A0A1X0XG42|A0A1X0XG42_KLUIN Isochorismate synthase M enF OS=Kluyvera intermedia OX=61648 GN=menF PE=3 SV=1
MHSISVALEQLREKLAGIDANSPGFYVFDVAFALNDAFDPLTFLASQSCFPQFYWQQRSGEDEAAALGQVLRFTSLAEARHFLDDNPEYDLRIWGLNAFVSQQGELFLPRLEWRREGGRAFLRLIVINDAAQRGDAEQARAFIDALVRAKSLPDVQMELVSQQHCPEQSGWEALVTQATQAIARGEMDKVVLARATDYRFSQPVNAAALMAASRRLNHHCFHYFIAFDPHNAFLGSSPERLWRRRGTSLRTEALAGTVANDTDDTRAAELGNWLMNDDKNQRENMLVVEDICQRLQRAAATLDVLPPQIVRLRKVQHLRRCIWTEMRHKDDAECLTLLQPTAAVAGLPRQAARAFITHYEPFAREWYAGSAGYLSLKQSEFCVALRCAKISGTTVRLYAGAGIVAGSDPTMEWQEIENKAAGLRSLLIMKHA

SEQ ID NO: 94092 - protein, 432 aa, Kluyvera sp.
  misc_feature (1)..(432): tr|A0A2T3XAN6|A0A2T3XAN6_9ENTR Isochorismate synthase M enF OS=Kluyvera sp. Nf5 OX=2116543 GN=menF PE=3 SV=1
MLSISVALEQLREKLSGIDANSPGFYVFDVAFALNDAFDPLTFLASQPCFPQFYWQQRSGEDEAAALGQVLRFPSLAEARHFLNDNPEHDLRVWGLNAFDPQQGELFLPRLEWRREGGRASLRLIVLNGNAQQNDVAQARSFIDALVRAKSLPDAQMELVSQHHFPQQSGWEALVTQATQAITRGEMDKVVLARATDYHFSQPVNAAAVMAASRRLNHHCFHFFIAFDPHNAFLGSSPERLWRRRGTSLRTEALAGTVANDTDDTRATELGDWLMNDDKNQRENMLVVEDICQRLQHATSTLDVLPPQIVRLRKVQHLRRCIWTEMHHNDDAQCLTLLQPTAAVAGLPRLAARAFITQHEPFEREWYAGSAGYLSLKQSEFCVALRCAKISGTTVRLYAGAGIVAGSDPTMEWQEIENKAAGLRSLLIMKHV

SEQ ID NO: 94093 - protein, 474 aa, Kocuria indica
  misc_feature (1)..(474): tr|A0A4P6RNB3|A0A4P6RNB3_9MICC Isochorismate synthase O S=Kocuria indica OX=1049583 GN=KocCE7_02755 PE=4 SV=1
MTPEFPAPRLSALTLPLSEVPAAAEFARNPDVRRLLGSADPATWIMRGKGIVGLGRVAAYRVRGGTRFTSARVWWDELRQDATVHDSVQRPGTGLLAFGAFAFAPSSTVDSGLMVPELVIGTDAHGAWLTLISTGPSEPTVEDVDAAWRRLVRAAPAVARPEEPDAAASSYPTAVPGTLDEQRWMEAVADGVGMIRAGELDKLVLARDVVVDTGRPIELGAVLGRLSERFATCWTYCVRLGPEQEGSEQEGPDDGEGAGRLLGATPEMLIRVHRGTATARVLAGTLDRQDLPDGANPEDFAGTELGGSEKQQREHRFAVDSLITGLSPYADEVSGGEHPFILALPNVWHLASDVTAQLRAGVDGTLPSALELAEAVHPTAAVCGTPTETAGAVIEDLERMDRGLYAGPVGWLDGAGNGEWGIALRGAVQLDAHRARVSAGCGIVAESDPRAELAETWAKLRPMLESLPARWDRE

SEQ ID NO: 94094 - protein, 526 aa, Kocuria rhizophila
  misc_feature (1)..(526): tr|B2GI34|B2GI34_KOCRD Isochorismate synthase OS=Kocuri a rhizophila (strain ATCC 9341 / DSM 348 / NBRC 103217 / DC2201) OX=378753 GN=KRH_05420 PE=4 SV=1
MTPEFPAPRLSALTLPLSDVPAAADLARDPDVRRLLASPDPATWIVRGRGLVGLGRAAAFRVRGGTRFTSARVWWDAVRDAARVTDPFALPGTGLLAFGAFAFAPSSTVDSGLMVPELVVGTSDDAAWVTLITSDPSPAPSDVDAAWRRLARLTPAAHDAAAPASDAASPSVRAGSTDIDAPAARAGATAETPRDAAARSDSGNASPEAATGRASADPVREVTGAAEGGAAASYPAAVPGALDEQRWMAAVADGVGMIRAGELDKLVLARDVVVDTGADIELGAVLGTLSERFDTCWTYCVRLGGEGSPNAGRLLGATPEMLIRVHRGTATARVLAGTLDRQDLPEGANPEDFAGTELGGSDKQQREHRFAVDSLIAGLSPYADEVSGGERPFILALPNVWHLASDVTAHLRTGVDGTLPSALELAEAVHPTAAVCGTPTETAGAVIEDLERMDRGLYAGPVGWLDGAGNGEWGIALRGAVQLDGHRARVSAGCGIVAESDPRAELAETWAKLRPMLESLPARGLG

SEQ ID NO: 94095 - protein, 407 aa, Kocuria rosea
  misc_feature (1)..(407): tr|A0A378GYI2|A0A378GYI2_KOCRO Isochorismate synthase e ntC OS=Kocuria rosea OX=1275 GN=entC PE=4 SV=1
MLRGTTPPAGTPVPLPRDEAGSGARGLEGDFAFAGRHGILLARRDRELPAGRITDGSVDPVLARLDEVTRAVAGTRAGGEARPVLCGTIPFDPDEPADLFLAERPVWAPRPAPTAPVPLARQLVPAAPAPDPDHHEALAEALDRIGRGAAPHLVLARALDLQLSAPADLDRLWEELVARAAGGHAFLVRPRDGGTVLGAGPELTAEVRPTGFASHPHTGCAARHPTVSGDSAAQQSLLRSPAARRRHQHVVEHQARRLAPLAASLHVPGQPSVPGTDAAWHLATRLTGRLHRGTSALHAAVALHRAAAGAPDWETLSLIRELEPRPRGVFAGLVGWTDAAGHGQWVPVLRSVHLHGTHARLHAAAELDAASTMDGALAETAANFGTVRAALAAAGAPARTGAVPHAA

SEQ ID NO: 94096 - protein, 468 aa, Kocuria sp.
  misc_feature (1)..(468): tr|A0A495AAC7|A0A495AAC7_9MICC Isochorismate synthase O S=Kocuria sp. 442 OX=2054280 GN=C1C97_005215 PE=4 SV=1
MTTEFPAPRLSALTLPLSEVPSAADFARDPDVRRLLASEDPATWIMRGRGLVGLGRAASFRVRGGTRFTSARVWWDAVSQDAAVMDRVDRPGTGLVGFGAFAFAPSSTVESGLMVPELVIGTSDDAAWLTLISDGTAAPTPGDVDAAWQRLARLAPTGAGGAGTGRGAAAGAAASSYPTAVPGALDEERWMAAVADGVGMIRAGELDKLVLARDVVVDTGEPIDLGAVLGRLSDRFATCWTYCVRLGAEHDAPGGAGRLLGATPEMLVRVHRGTASARVLAGTLDRQDLPEGANPEDFAVTELGGSEKQQREHRFAVDSLIAGLSPYADEVSGGEHPFILALPNVWHLASDVTARLRAGVDGTLPSALELAEAVHPTAAVCGTPTETAGAVIEDLERMDRGLYAGPVGWLDGAGNGEWGIALRGAVQLDGHTARVSAGCGIVAESDPRAELAETWAKLRPMLESLPAR

SEQ ID NO: 94097 - protein, 470 aa, Kocuria tytonicola
  misc_feature (1)..(470): tr|A0A3L9LB78|A0A3L9LB78_9MICC Isochorismate synthase O S=Kocuria tytonicola OX=2055946 GN=EAE32_03890 PE=4 SV= 1
MTTELPAPTLSALTLPLSDVPSAAGFARDPDVRRLLDGPDPATWIVRGRGLVGLGRAATFRVRGGTRFTAARVWWDAVRQDAAVEDRVRRPGTGLLAFGAFAFAPSSTAASGLVVPELVVGTDDDAAWLTLIVPGATVPTPADVDAAWSRLARVAPGPVAGATPERLDGPAAGGAASSYPTAVPGTLDEGEWMAAVADGVAMIRAGELDKLVLARDVVVDTGRPIELGAVLGRLSERFATCWTYCVRLGDEDSPEEGSGRLLGATPEMLVRVHRGTASARVLAGTLDRQDLPDGANPDDFAITELGGSEKQQREHRFAVESLVAGLSPYADEVSGGERPFILDLPNVWHLASDVTARLRAGVDGTLPSALELAEAVHPTAAVCGTPTETAGAVIEDLERMDRGLYAGPVGWLDGAGNGEWGIALRGAVQLDAHRARVSAGCGIVAESDPRAELAETWAKLRPMLESLPAR

SEQ ID NO: 94098 - protein, 363 aa, Kordia sp.
  misc_feature (1)..(363): tr|A0A345H5Q7|A0A345H5Q7_9FLAO Isochorismate synthase E ntC OS=Kordia sp. SMS9 OX=2282170 GN=entC PE=4 SV=1
MLDKLSEQLQKQFPFVAYRKPNAAQVQLVLQKDAMLHTVSDFTESGFVFAPFDETKSTILIPFDTVLVGEMEHVAEHEAANASMNPSAEAKKKHIQLVQKGVETIQKSEIQKIVLSRQEAIESSKNPFLIFERLRENYPTAFVYLWYHPKVGMWAGATPETLVSSYGNSIKTMSLAGTRKFQENVAVNWNQKEIEEQQIVTNFIANQLKNMTTNLSVSKATTHQAGSLVHLCSLISGRMTSDTNIGDIVKTLHPTPAICGFPTEAAKAFILQEENYDRTFYTGFLGELNVKEETSRNRNRKNQENSAYRTVRSRSELYVNLRCMQLTDTNKILYVGGGITKDSDPESEWEETLAKSQIMKRVL

SEQ ID NO: 94099 - protein, 432 aa, Kosakonia arachidis
  misc_feature (1)..(432): tr|A0A1I7CVJ1|A0A1I7CVJ1_9ENTR Isochorismate synthase M enF OS=Kosakonia arachidis OX=551989 GN=menF PE=3 SV=1
MLSISSALGDLYRRLTERFPRSPGFQFFDVPFPLNDAFDPLAWVASQSVWPQFYWQQRSGDEETAALGALCRFSSLPLAQQFLYPLPEDVRIWGLNAFDPSQGSLFLPRLEWRREGGRAMLRLYLYSDTSLHDDAERAVEFLQALSPFTPLAILKQQPCLVQRHYPERDAWKSLIAQALGTLESAALDKVVLARATDYCYANAVDAASLMAASRRVNYHCFHFMMVFDAHNAFLGSPPERLWRRRGNALRTEALAGTVAGHDDDLQAQRLGAWLMNDDKNQRENMLVVEDICQRLQQQTAALDVLPPQIVRLRNVQHLRRCIWSDLQTPDDALCLQLLQPTAAVAGLPRRAAWDFIQRHEPFAREWYAGSAGYLSRQQSEFCVALRSAKVSGSTVRLYAGAGIVPGSDAEQEWQEIDNKAAGLRSLLELTHA

SEQ ID NO: 94100 - protein, 431 aa, Kosakonia cowanii
  misc_feature (1)..(431): tr|A0A410KBG0|A0A410KBG0_9ENTR Isochorismate synthase M enF OS=Kosakonia cowanii OX=208223 GN=menF PE=3 SV=1
MFSLSSALGDLHQRLADTFPDTPGFTLFDVPFPLNNAFDPLTWLSAQRVFPQFYWQQRSGDDEAAALGALRTFTSLAEAQQQLQVYPDDVRVWGLNAFEPSESALFLPRLEWRREGGKAMLRLYLYSATSLRDDAQCAADFLNALSSTTPLAMSPARCVEQHHFPTREGWETLISQALETLQRGELDKVVLARATDYRFDAPINAGALMAASRRLNLHCFHFLYRFNDQTAFLGSTPERLWRRRGKALRTEALAGTVANHDDDAQAQQRAAWLMNDDKNQRENMLVVEDICQRLQQQTGALDVLPPQVVRLRKVQHLRRCIWSDLRVADDALCLDLLQPTAAVAGLPRPEARRFIARHEPFAREWYAGSAGYLSRKQSEFCVTLRSAKVSGETVRLYAGAGIVPGSDAAQEWQEIDNKAAGLRSLLLQTHP

SEQ ID NO: 94101 - protein, 432 aa, Kosakonia oryzae
  misc_feature (1)..(432): tr|A0A1T5HGY6|A0A1T5HGY6_9ENTR Isochorismate synthase M enF OS=Kosakonia oryzae OX=497725 GN=menF PE=3 SV=1
MLSISSALGDLYRCLTDRFPRSPGFCFFDAPFPLNDAFDPLAWLASQPVWPQFYWQQRSGDEETAALGALCHFSSLPLAQQFLHALPEDVRIWGLNAFDPSQGSLFLPRLEWRREGGRAMLRLYLYSETSLHDDAERAAEFLQALSPFTPLANLKQQPCLAQRHYPEREAWKSLIAQALGTLESAELDKVVLARATDYSYANAVNAASLMAASRRVNYHCFHFMMAFDAQNAFLGSSPERLWRRRGHALRTEALAGTVAGHDDDLQAQRLADWLMGDDKNQRENMLVVEDICQRLQQQTAALDVLPPQIVRLRNVQHLRRCIWSDLQTPDDALCLQLLQPTAAVAGLPRRSAWDFIQRNEPFTREWYAGSAGYLSRQQSEFCVALRSAKVSGSTVRLYAGAGIVPGSDAEQEWQEIDNKAAGLRSLLELTHA

SEQ ID NO: 94102 - protein, 426 aa, Kosakonia oryzendophytica
  misc_feature (1)..(426): tr|A0A1C3Z495|A0A1C3Z495_9ENTR Isochorismate synthase M enF OS=Kosakonia oryzendophytica OX=1005665 GN=menF PE= 3 SV=1
MYSISSALEHLHNRLADDLPHSPGFCFFDAPFPLNDSFDPLAWLASQPVYPQFYWQQRSGEDEAAALGALRHFASLPLAQQFLQQCPDDVRAWGLNAFNLQQGALFLPRLEWRREGGQAILRLYLLSEHSLHDDAVHAADFLQTLTAFKPLASAQQVCVEQRHVPDREGWETLMAQALRALDKAELDKVVLARATDYAFSNAVHAASLMAASRRLNHHCFHFLFAFDAQQAFLGSSPERLWRRRGTALRTEALAGTVASHDDDQQAQRLADWLMSDDKNQRENMLVVEDICQRLQRETGALEVLPPQVIRLRKVQHLRRCIWTDLQTPDDALCLQLLQPTAAVAGLPRREAWAFIQQHEPFEREWYAGSAGYLSRAQSEFCVALRSAKINGNTVRLYAGAGIVPGSDAEQEWQEIENKAAGLRSLL

SEQ ID NO: 94103 - protein, 432 aa, Kosakonia oryziphila
  misc_feature (1)..(432): tr|A0A1C4EBA2|A0A1C4EBA2_9ENTR Isochorismate synthase M enF OS=Kosakonia oryziphila OX=1005667 GN=menF PE=3 SV= 1
MLSISSALGDLYRRLTERFPRSPGFHFFDAPFPLNDAFDPLAWLASQSVWPQFYWQQRSGDEETAVLGALCHFSSLPLAQQFLHSLQEDVRIWGLNAFDPSQGALFLPRLEWRREGGRAILRLYLYSETSLYDDAERAAEFLQALSPFTPLASLKQQPCLEQRHYPERDAWKNLIAQALGTLESAALDKVVLARATDYCYANAVDAASLMAASRRVNYHCFHFMMAFDAQNAFLGSSPERLWRRRGNALRTEALAGTVAGHDDDLRAQHLAAWLMSDDKNQRENMLVVEDICQRLQQQTAALDVLPPQIVRLRNVQHLRRCIWSDLQTPDDALCLQLLQPTAAVAGLPRRAAWDFIQCHEPFTREWYAGSAGYLSRQQSEFCVALRSAKVSGSTVRLYAGAGIVPGSDAEQEWQEIDNKAAGLRSLLELTHT

SEQ ID NO: 94104 - protein, 432 aa, Kosakonia radicincitans; identical to SEQ ID NO: 94101
  misc_feature (1)..(432): tr|A0A1V0LBG6|A0A1V0LBG6_9ENTR Isochorismate synthase M enF OS=Kosakonia radicincitans DSM 16656 OX=1177180 GN= menF PE=3 SV=1

SEQ ID NO: 94105 - protein, 431 aa, Kosakonia sp.
  misc_feature (1)..(431): tr|A0A4R0HV35|A0A4R0HV35_9ENTR Isochorismate synthase M enF OS=Kosakonia sp. WCHEs120001 OX=2529380 GN=menF PE= 3 SV=1
MYSISSALSHLHRCLIDDIPRSSGFCFFDAPFPLNDAFDPLTWLASQRVWPQFYWQQRNGDDEAAALGALCRFSSLPLAQQFLQHCAEDVRIWGLNAFDPTQGELFLPRLEWRREGGHAFLRVYIFSETSLHDDAQRALTFLSALVESTPLQNVQQTCLEQHHIPGRDGWRTLIAQALQTLESGELDKVVLARATDYHFASAVDAAALMAASRRLNHHCFHFMMAFNAQAAFLGSTPERLWRRRGSALRTEALAGTVANHEDDQQAQQLADWLMADDKNQRENMLVVEDICQRLQQQTGALEVLPPKVVRLRKVQHLRRCIWTVLQTPDDALCLQMLQPTAAVAGLPRREARAFIQRHEPFQREWYAGSAGYLSRQQSEFCVALRSAKIDGNTVRLYAGAGIVSGSDAEQEWQEIENKAAGLRSLLQLSHA

SEQ ID NO: 94106 - protein, 422 aa, Kribbella albertanoniae
  misc_feature (1)..(422): tr|A0A4R4PNG6|A0A4R4PNG6_9ACTN Isochorismate synthase O S=Kribbella albertanoniae OX=1266829 GN=E1261_27935 PE= 4 SV=1
MSLSEPVRSGRVAAPQLVVRSQPVEGVAKQLIDHLPAEGGLSWVRRGDGHIGWGVAARLDVAGGNRFTEAVLWWQELVGAAVVRDEIGVPGSGLVCFGSFGFTDEDPGELVVPEVIVGRRGGTTWVTTISPASLAAPPDLVTHEAHPVYDVTFADGARSGTDWSSIVADAIKRITSGELDKVVLARDLIAIAEQPIDLRWPLRRLAEAYPNCWTFSVDGLIGATPELLVRREKGLITSRVLAGTIRRTGDDAHDLALAASLARSSKDLEEHEFAVRSVADALKPHCKSMNVPETPFVLHLPNVMHLATDVAGVANNGASALGLAAALHPSAAVCGTPTPVARDLIGEIEGMERGRFSGPVGWMDAAGDGEWCIALRCGQADPTDPRRMRLFAGAGIVAGSDPTAELAETNAKLVPMRDALGD

SEQ ID NO: 94107 - protein, 423 aa, Kribbella antibiotica
  misc_feature (1)..(423): tr|A0A4R4ZFL6|A0A4R4ZFL6_9ACTN Isochorismate synthase O S=Kribbella antibiotica OX=190195 GN=E1263_24310 PE=4 S V=1
MSLSDPVRSGRVVAPHLVVRSQPVEGVAAQLLDHLPAEGGLSWVRRGDGHIGWGVAARLDVAGGNRFQDAMLWWQELVGAAVVRDEIGVPGSGLVCFGSFGFTDSDPGELVVPEVIVGRRGGTTWVTTISPASSLAGPPDLVTHEASPVHDVTFSDGARSGTDWSSIVADAIKRITAGELDKVVLARDLIAIAEQPIDLRWPLRRLAAAYPNCWTFSVDGLIGATPELLVRREKGLITSRVLAGTIRRTGDDAHDLALAASLARSSKDLEEHEFAVRSVADALKPHCKSMNVPETPFVLHLPNVMHLATDVAGVANNGASALGLAAALHPSAAVCGTPTDVARDLIGEIEGMERGRFSGPVGWMDAAGDGEWCIALRCGQADPHDARRIRLFAGAGIVAGSDPTAELAETNAKLVPMRDALGD

SEQ ID NO: 94108 - protein, 423 aa, Kribbella pittospori
  misc_feature (1)..(423): tr|A0A4R0KLK5|A0A4R0KLK5_9ACTN Isochorismate synthase O S=Kribbella pittospori OX=722689 GN=E0H73_24110 PE=4 SV =1
MSLSDPVRSGHQPAPHLVIRSQPVDGVSAQLMDHLPTEGGLAWVRRGDGQVGWGVAARLDVAGSNRFQDAVSWWKELVAAAVIRDEVGVPGSGLVCFGSFGFTDQDPSELVVPEVIVGRRGGTTWVTTISPASSLTAPPELVANEPNPVYDVTFSDGARSGTDWSSIVADAVQRITAGELDKVVLARDLIAIAEQPIDLRWPLRRLAAAYPNCWTFSVDGLIGATPELLVRREKGLITSRVLAGTIRRTGDDAHDLALAASLARSSKDLEEHEYAVRSVAEALKPHCKSMQVPETPFVLHLPNVMHLASDVAGVAANGASALGLAAALHPSAAICGTPTPVARNLIGEIEGMQRGRFSGPVGWMDAAGDGEWCIALRCGQADPDNPRRMRLFAGAGIVAGSDPVAELAETNAKLVPMRDALGD

SEQ ID NO: 94109 - protein, 426 aa, Kribbella sindirgiensis
  misc_feature (1)..(426): tr|A0A4R0IZU8|A0A4R0IZU8_9ACTN Isochorismate synthase O S=Kribbella sindirgiensis OX=1124744 GN=E0H50_11045 PE= 4 SV=1
MSASPGSRAALATRGPAPQLVVRSQAVDGVSAQLLDHLPDEGGLAWVRRGDGHVGWGVAARLDVAGSNRFQEAMTWWQELTSAAVIRDEVGVPGSGLVCFGSFGFTDQDPGELVVPDVIVGRRGDTTWVTTVSPASSLGAPPELVVHEPSPVYDVAFADGARTGTDWSSIVADAVRRITAGELEKVVLARDLIAIAEQPIDLRWPLHRLATAYPNCWTFSVDGLIGATPELLVRREKGLITSRVLAGTIRRTGDDEHDLALAASLARSSKDLEEHEFAVRSVAEALEPHCTSMNVPETPFVLHLPNVMHLATDVAGVANNGASALGLAAALHPSAAVCGTPTPVARDLIGEIEGMQRGRFSGPVGWMDASGDGEWCIALRCGQADPDEPRRMRLFAGAGIVAGSDPDAELAETNAKLVPMRDALGD

SEQ ID NO: 94110 - protein, 426 aa, Kribbella soli
  misc_feature (1)..(426): tr|A0A4R0HT06|A0A4R0HT06_9ACTN Isochorismate synthase O S=Kribbella soli OX=1124743 GN=E0H45_06760 PE=4 SV=1
MSASPGSRAALATRGPAPQLVVRSQAVDGVSAQLLDHLPDEGGLAWVRRGDGHVGWGVAARLDVAGGNRFQEAMTWWQELTSAAVVRDEVGVPGSGLVCFGSFGFTDQDPGELVVPDVIVGRRGDTTWVTTISPASSLGAPPELVVHEPSPVYDVTFADGARTGTDWSSIVADAVRRITAGELDKVVLARDLIAIAEQPIDLRWPLHRLATSYPNCWTFSVDGLIGATPELLVRREKGLITSRVLAGTIRRTGDDEHDLALAASLARSSKDLEEHEFAVRSVAEALEPHCTSMNVPETPFVLHLPNVMHLATDVAGVANNGASALGLAAALHPSAAVCGTPTPVARDLIGEIEGMQRGRFSGPVGWLDASGDGEWCIALRCGQADPEEPRRMRLFAGAGIVAGSDPDAELAETNAKLVPMRDALGD

SEQ ID NO: 94111 - protein, 426 aa, Kribbella sp.; identical to SEQ ID NO: 94109
  misc_feature (1)..(426): tr|A0A4R0JA93|A0A4R0JA93_9ACTN Isochorismate synthase O S=Kribbella sp. YM55 OX=1572660 GN=E0H92_06320 PE=4 SV= 1

SEQ ID NO: 94112 - protein, 474 aa, Kroppenstedtia eburnea
  misc_feature (1)..(474): tr|A0A1N7L897|A0A1N7L897_9BACL Isochorismate synthase M enF OS=Kroppenstedtia eburnea OX=714067 GN=menF PE=3 SV =1
MGGRTVTTMRELHNLAGLKEGAARARREQRPVLVSRTRLVNSLDPLSFFASATGYRGTRNFWSDPDREVTLVGVGAAWKLETHTREDSYLKTGQEWDHLLKGAIRVPAEAPTGTGPLLLGGFSFDPLAGKTPLWEGFFDASFILPQFLLTVTGGECWLTVNVLLHPGEDVEQRGKMLAEQEDELLEAAEDFHLFPPARASFDVVEVEPDRWKKTVATAAREIREGALEKVVLARQLRVQSETSFSPEAGLYRLRERQPHSFLFAVERGEACFLGASPERLVKREGERLYSTCLAGTTRRGEDPEEDRKLGEELLSDPKNEGEHAVVVHMIREAFQQGCSQVRVPDSPTLYRVRDVQHLFTPVEGTPLPETTLLSMVQQLHPTPALGGFPQKEAVARIRETEGMDRGWYSAPVGWLDYRGDGEFACAIRSGLIRGREASLFAGCGIVGDSEPDSEYEETKLKFKPMLSALGGDGR

SEQ ID NO: 94113 - protein, 379 aa, Kroppenstedtia sanguinis
  misc_feature (1)..(379): tr|A0A482TXA2|A0A482TXA2_9BACL Isochorismate synthase O S=Kroppenstedtia sanguinis OX=1380684 GN=D1G38_013965 P E=4 SV=1
MSVSAPRYGDNVSAAPTFLLSGDPGSVRGSGVARAFSDGEAAAAALRDGGCAALVGALPFTPGDPVALWEPAELITDHDPIRPSWPQRRRLRVNAARPEPAEHQRRVAELVSRIRAGEAGKVVLARALEMSLEEDVDPLALAAAFAHGNAAHNAFAVALDAAGGSHAGQWLVGASPELLVRRRGPEVFCRPYAGTMARSDNPAVDKERAEALRGSAKDLAEHAFVVDYLRERLAPFCTELDMPAEPVLLSTGELWHLATPIRARLKDPATTSLDLALALSPTPALCGTPSDVAAAMIEQYERDRGFYGGAVGWSNADGDGDWVVAIRCVLLDADRRRVTAWAGGGIVADSDPAAELAETTAKFGTALRALGADPAVADR

SEQ ID NO: 94114 - protein, 492 aa, Ktedonobacterales bacterium
  misc_feature (1)..(492): tr|A0A4P6JRK0|A0A4P6JRK0_9CHLR Isochorismate synthase O S=Ktedonobacterales bacterium SCAWS-G2 OX=2509675 GN=EP A93_16180 PE=4 SV=1
MDIVFIDTPDTSDITGLESVVRHREQLLSTLLQASHKASSLHQNVLASLTLPIAAEDPLLIFKTFKQGSADEIFFWAHPEEQSAFVGVGAAITIEATGLTRCASAAAQWHAIQEHAVITASSIHLGGPMLFGGFSFDPLLPSQQLWQDFPDALLILPLLHYHYSGTRAALTINQPVNEGDDIARLADEISARIRSLHEAIEAENGAGTVQDKASLQLSIQNLLPESAWKSKVADAVKMIQSGAFEKVVLARGVRVVNTAEEAFDIGAVLPQLYKTYPSAHIFAFQRGQRTFVGATPEPLIEAHNKQLRTMPLAGSAPRGETEAEDRRLGTELLHSAKNKVEHEIVVVTIQKVLASLCSTVRVEDTPHLLRLKNIQHLATTIVGDLLPGHSLLEALQDLAPTPAVGGFPRKPALEFIRKQEGLERGWYSGSIGWLDMQGNGEFALALRSALIEGNQAILFAGGGIVADSHPESEYSETCWKLQVMLRGLRGKD

SEQ ID NO: 94115 - protein, 462 aa, Kurthia sp.
  misc_feature (1)..(462): tr|A0A0X1RXT6|A0A0X1RXT6_9BACL Isochorismate synthase f amily protein OS=Kurthia sp. 11kri321 OX=1750719 GN=ASO 14_769 PE=4 SV=1
MNRKLSTINGDLSKTDQSTVHFYIESKELETQSTLIFFEIGEEKFKGQCFYWQNKDKDFTLVGLGHAYTIKSNDADARYEDVEKAWKHLIHSTSLKGIKQQPILFGSFTFDPKKGVSDEWANFSHANFALAKHQLVESNGRFYMNTHLVSEEVITNEDIELAREEREALLEQAKGRTLKTYIKPHVVLTEEPYKEEYLQSITQVTNQIKAKQADKVVIARSLALTFDEEVNTSNLLAQLSEEQPESYLFAQEQGQDLFLGATPERLVFVNHKKAYSSCVAGSIRRGATVQEDEEFGRILLNDTKNLQEHQYVVDMISNSFKETCEQYTLPNHPDLLKIRDIQHLHTPIEGILKEDATILQMVEKLHPTPALGGSPREVAMEMIRQYEPMNRGVYAAPIGWLNADGDGEFAVAIRSALLQDKKAYLYAGGGIVEDSEPQSEYEETLVKFRPMLRTLGGKLNDE

SEQ ID NO: 94116 - protein, 462 aa, Kurthia zopfii
  misc_feature (1)..(462): tr|A0A3S4VRM7|A0A3S4VRM7_9BACL Isochorismate synthase e ntC OS=Kurthia zopfii OX=1650 GN=entC PE=4 SV=1
MNHKLSTTNDDLKNTDQSTVRFYIETLEIDRLSALPFFEAGEKSFEGMRYFWQNREKNFTLVGLGNAYTIESNEENQRYTNVENQWKQLLQGVDYENLLQQPILFGSFTFDPKKGVSDEWSNFSHANFALATHQLVIRNEKAYVNTHIVSKQNISEEQISKLLAERDEIIHQAQVKGSKTYAKPVVNRMTEPFKEEYLKSISNVTDAIKDGQADKVVIARSLALRFDEKVDPTNVLTQVYNEQPESYLFGQENGENLFFGASPERLVSVKDGQAYSSCIAGSIKRGATKEHDNALGAELLNDEKNLQEHQYVVDMITSSFEDTCSSYTVPESPQLLKIRDIQHLYTPVEGYLNDGATILQMVEKLHPTPALGGAPRGKAMEMIRQYEPMNRGIYAGPIGWLNAEGDGEFAVAIRSALLQKDQAYLYAGGGIVADSEPQSEYEETLVKFRPMLRALGGKLNDE

SEQ ID NO: 94117 - protein, 402 aa, Kushneria phyllosphaerae
  misc_feature (1)..(402): tr|A0A2R8CJN1|A0A2R8CJN1_9GAMM Isochorismate synthase D hbC OS=Kushneria phyllosphaerae OX=2100822 GN=dhbC PE=4 SV=1
MNQPLPSRFPLDQAPWGLLEGLKPGDAFFSSPATTLLGRGTAHARHTPDARPETLDAAARELFDTARAQGHPDPVIMGLIPFNHADSARLFVPRELLRAAPGTFEQCPASAPLETRALAITPEPSPEHYCQAVDSALTLFETTALNKVVLARSLRADTQAPVDAQALLKRLLSINPRGYNFALPAGDTESLVGASPELLIRRVGNRIIANPLAGSVPRHSDPQEDQRRAEGLYVSDKDLREHALVVEAIVTALRPLCRTLEVPEGPEVIATDRMWHLSTTIEGELADPTMTSLSVAAALHPTPAVCGAPWQDAHQAIASFEGFERGYFTGLVGWCDATGDGEWAIAIRCAELAPDHVRVFAGAGVVPGSSPQGELEETAAKMRTMLDAMGLDYEDDATNVTA

SEQ ID NO: 94118 - protein, 374 aa, Labedella endophytica
  misc_feature (1)..(374): tr|A0A433JXC0|A0A433JXC0_9MICO Isochorismate synthase O S=Labedella endophytica OX=1523160 GN=ELQ94_02095 PE=4 SV=1
MVGIGEVLRLEFTGPDRMREAAAFWRRIAEAATVSDAVGVPGSGLVAFGTFAFSGVSGMPSTLIVPRTIVGRRGSHTFVTRIRRADEPDDAARLVPSRRFGDEFRISLGAGAETADGFVHHVEQAVERIAHGDLSKVVLARELTGRIPQGADLRRVLTDLALGYPDCWTFSVDGLVGSSPETLVRVEDRTVGARVLAGTASRGTNADTDQKAALALVTSSKDQDEHQFAVRSAVETLTPFTRHLSTSEVPFALKLPNLWHLATDLEGGLAGDASSIDLIDAMHPTAAVAGAPRAEAVELIAELEPFDRGRYAGPVGWVDAAGDGEWAIALRCAQVAPSGTVTAYAGCGIVLDSDPAAELAETRMKFRPIVEAFG

SEQ ID NO: 94119 - protein, 461 aa, Labedella phragmitis
  misc_feature (1)..(461): tr|A0A444PSZ9|A0A444PSZ9_9MICO Isochorismate synthase O S=Labedella phragmitis OX=2498849 GN=ELQ90_09240 PE=4 S V=1
MLRTSGTSSSPRARASTVRATTDRSHDALLVPGPGPAPPTGLRLESVISTGTTPALVASTKRADVVGPLLAHADAQRPLVWSRRGDGLVGIGEVLRLEFSGPERMRDAAAAWREVASAATVTDGVQVSGSGLVAFGTFAFSAESEARSVLIVPRTIVGRHGSTTFVTRIRRADEPDDDARLTASRRFGDEFRISLSAGEETADGYIDHVGQAIDRIASGALSKVVLARELSGHVPAGADLRRVITDLALGYPDCWTFAVDGLIGSSPETLVRVEAGTVGARVLAGTASRGVNAEADQKAALALVTSTKDQDEHQFAVRSAVESLRPHTRHLATSEVPFALKLPNLWHLATDLEGAIDGGASSIDLIDAMHPTAAVAGSPREEAVALIAELEPFDRGRYSGPVGWVDASGDGEWAIALRCAQVDEDGDVTAYAGCGIVVDSDPAAELAETRMKFRPIVDAFG

SEQ ID NO: 94120 - protein, 414 aa, Labedella populi
  misc_feature (1)..(414): tr|A0A444Q718|A0A444Q718_9MICO Isochorismate synthase O S=Labedella populi OX=2498850 GN=ELQ92_12615 PE=4 SV=1
MSTGTPPALVASTRRVDGIGPLLAHADAQRPLVWSRRGDGLVGIGEALRLEFRGADRMREAAAAWRDVAAAATVTDGVRVSGSGLVAFGTFAFSADSQEPSVLIVPRTIVGRHGSTTFVTRIRRADEPDDDSRLTASRRFGDEFRISLSAGEETADGYVEHVGHAIDRIASGALSKVVLARELTGHVPAGADLRRVITDLALGYPDCWTFAVDGLIGSSPETLVRVEAGTVGARVLAGTASRGVNADADQKAALALVTSTKDQDEHQFAVRSAVESLRPHTRHLATSEVPFALKLPNLWHLATDLEGALDGGASSIDLIDAMHPTAAVAGSPREEAVSLIAELEPFDRGRYSGPVGWVDASGDGEWAIALRCAQVDPDGDVTAYAGCGIVIDSDPAAELAETRMKFRPIVDAFG

SEQ ID NO: 94121 - protein, 393 aa, Labrenzia aggregata
  misc_feature (1)..(393): tr|A0A0M6Y998|A0A0M6Y998_9RHOB Isochorismate synthase E ntC OS=Labrenzia aggregata OX=187304 GN=entC PE=4 SV=1
MATGARVMRHEDVAIQPDPKRKFLFTSGGNELHADGIRERIAVPARTGKTSGDLFQATVGAALERARNAGQENPIVVGAIPFDLGEVSCLYVPERHEWRTCKGPNGGAVSKRIMPELLAQRSYPDEAGFKRAVQHAIVNFQHSDVRKAVLSVIRELQFAEPVDVERLMTSLRAQNTDGYQFQVPLPDGSELIGVSPELLIRKSGRSFTSNPLAGSTRRLPELAADKDAGTELLRSEKDRYEHRLVVEDIHRLLQPYCSQIDVPDQPSLLGTAALWHLSTRIEGQLNDPSMTVLQLACLLHPTPAVCGYPTELAHRLIRFVEPFERGLFTGIVGWCDAEGNGEWAITIRCGIVERDVVRLFAGAGIVEASQPDCEWAEVQTKLGTMLKACGLAA

SEQ ID NO: 94122 - protein, 392 aa, Labrys neptuniae
  misc_feature (1)..(392): tr|A0A5C1W983|A0A5C1W983_9RHIZ Isochorismate synthase O S=Labrys neptuniae OX=376174 GN=FZC33_04535 PE=4 SV=1
MRAGAIAMYSDGKTISSTDGSNLLFSTGSRELRAFGQHLPISTPARGGEDWGSQFQRSVRQALDEARAGGQDNPIVMGAIPFDMREPSCLYVPQAYEWRERQAPRAPDGADRLPALLDQRSIPDEPGFKKAVEQAILNFRHGDIRKVVLSVMRELRFAGSVDVDSLLDSLAVQNSSGYQFRVPLPDGGELIGVSPELLLQKEGDRFVSNPLAGSARRQPFPEADQATADALLQSPKDLYEHRVVIDDIRRVLEPHCAELVIPTSPSVISTAALWHLSTRLHGRLSDPQTSALQLACRLHPTPAVCGTPTEQAHKLIRFVEPFERGLFTGMVGWCDSKGDGEWVVTLRCGIVDREIVRLFAGAGIVEASQPEAEWAETQTKLKTMLNACGLAA

SEQ ID NO: 94123 - protein, 445 aa, Lactobacillus antri
  misc_feature (1)..(445): tr|C8P8M8|C8P8M8_9LACO Isochorismate synthase OS=Lactob acillus antri DSM 16041 OX=525309 GN=menF PE=4 SV=1
MIQLLNQVITKPYALYSYRISADLAQLCRQNQGYFNQQVFWQAADGKRTYWGIQPQRFLVGQSSAAIKKFQRAFSQQWQNLTPAFSCQPVLLGGFPFDSRGKRAPFWQQLEQGYFILPQILFMQDKERTTVSLLVPTNQEVRPQLVTLVDQVDQILARQIGPQPVPAVHGEELAVNEWLQLVNQSVTAIMDHRLKKVVLARQLRLTADAPFNAAEILQRLICQQENTYHFLVQAGNRTFVGASPERLLKADARNFTTASVAGSIRRGKTPGEDEQLGQQLLTDHKNNHEHQLVVERIQQVLAEYATAVTVGQQRLLKNRDIQHIYHPISGRRKPGGAMLDLLAALHPTPALGGEPRQAALAWLAAREPAGRGMYGGPVGWLGLGADEGEFAVGLRSGVFSQQAGLLYAGCGIVAGSVAAKERRETGLKFQPMLRGVSDQWIINKH

SEQ ID NO: 94124 - protein, 432 aa, Lactobacillus bombi
  misc_feature (1)..(432): tr|A0A347STA9|A0A347STA9_9LACO Isochorismate synthase O S=Lactobacillus bombi OX=1303590 GN=DS830_07155 PE=4 SV =1
MSAALFIKTKTIDSLNLPQAMAWLQNQAGPNFAWENPTQDHLMIASGQILEVFSQQAVNFNDLNNLLQQAQQQLGDLSAKELSHLKVVGGFPFNIHQLGAEVWQNLKGGRLWIPHILIERRQNTNYLTLIESNPHQINSHWDKVFHQIQTTSPLKAQRYSLTDVQELALLQYQNSLKIALQKIATGSLKKVVVGRFAVGNLTAVQPAAVWLQLRDSQPDVYHILIQDQQTAFLSATPERLLATKKQHFQTAAVAGTIRRDSNPIIDQQLQQDLLHDYKNLQEQDLVVQWIKTALQKLHLQVSAPMTPQIIQTATVQHLYTPIQADGFANPAQVLAQLHPTPALGGLPKAAALNFLKNHESESRGMFGAPIGYLDANNQGEFAVGIRSCLLTPNQIRLFAGSGIINGSEINTETQETYNKLQAMLSAFQIEDR

SEQ ID NO: 94125 - protein, 449 aa, Lactobacillus coryniformis
  misc_feature (1)..(449): tr|A0A5B8TIY5|A0A5B8TIY5_9LACO Isochorismate synthase O S=Lactobacillus coryniformis OX=1610 GN=FGL77_01330 PE= 4 SV=1
MVAHNKTRNQSEKSEKVLQARKTKVTWSAAQWQQYESRGVQLDQYAVFENTDQTVAWYGFGAVATYTPSSPAAFTAVAAWVKQLRQQLASTVSSQDIAILGGFAFSTPGATQHNGWGALANGYFMLPRFLVKRSGGQTELIELSAAAFASADLLADFEQFLPAIVQPGVEVDLLQQVEDAASWQQAVQQVVTRLQTDAYLQKVVLARTLMVTAAQPFSVTQLLLALRQVHTQVYHLVLKVADQLFISATPERLVAVQGQHLATAAVAGTTARGVDAATDAALGAALLKDQKNRAEQQIVVTAIQQRLQNLTTELVLPARPQLLKSQQVQHLYTPITAKLQPAADLFTAVAALHPTPALGGQPAALALPLIQQLEPEYRGLFGAPFGYATLAGDGEFAVAIRSMLVQQQQAFLFAGAGIVAASKPAAEVRETTLKFQPMLQLLRGVDHAK

SEQ ID NO: 94126 - protein, 426 aa, Lactobacillus rennini
  misc_feature (1)..(426): tr|A0A1K2I530|A0A1K2I530_9LACO Isochorismate synthase @ Menaquinone-specific isochorismate synthase OS=Lactoba cillus rennini OX=238013 GN=LREN565_0556 PE=4 SV=1
MLQVRTQTISLSSAQWQTLEKQALALSHYIVFESADQTSAWYGFGATAICKPANNAAGYQKVANWLAGLHQQMINSINPEMLAILGSFSFMKIGKQHNDWQKLTNGYFILPRFLIKKTAQKTDLIETTEQQFATADIVQDFKQYLPQTKVANNRDKLSYYADAKTWQRHVAEIVQQIQGRSTLEKVVLARTLQVNNEMDFDYAKILTRLRQKQLAVYHLVLKVDHQLFVSATPERLVKLTAGVLQTAAVAGTAPRGVEKYQDQALGTALLQDKKNRSEQQIVVAEIKRRLTPLTTHLEIPDEPILLKSQRVQHLYTPIRAHLAANENIFTLIAALHPTPALGGYPKEAALTLIRRWEPDFRGLFGAPFGYVTFAGTGEFAVAIRSMLIHGQRAKLFAGAGIVAASDPKQEVQETSLKFEPMLTLLQ

SEQ ID NO: 94127 - protein, 449 aa, Lactobacillus sp.; identical to SEQ ID NO: 94125
  misc_feature (1)..(449): tr|A0A3R8GGD7|A0A3R8GGD7_9LACO Isochorismate synthase O S=Lactobacillus sp. OX=1591 GN=DUD28_07310 PE=4 SV=1

SEQ ID NO: 94128 - protein, 378 aa, Lactococcus garvieae
  misc_feature (1)..(378): tr|K2PVV3|K2PVV3_9LACT Menaquinone-specific isochorisma te synthase OS=Lactococcus garvieae DCC43 OX=1231377 GN =C426_1138 PE=4 SV=1
MNYRRKNLNLKHPLAFWSAFPDPSERFFWYDSQKQTLIIASERLTTLQEEDIEKYPYVFYSQSFFNEVEGELWQDFGNELVAFKHYFVQTPTESYVLTCDNLPDMKDEEIKENKNTYKEEPDDYPSWQELYNKLQESITSGKTVKIVASREIKFTASRAFEIEAIIKRLMQNNPGAFVFAYHKAGKTFLGASPEILVQKEGDEILSYALAGTMPRTVKHAAELLLKDPKNRHEHQIVVQKIKEKMLEKSSDVSIGETSTMALKNIYHLRTLLTTTDKQHSIIDWSKHLHPTPALGGEPSQPALSFLRENEKHERGLYAAPLGLIDKHGNGTLIVAIRSALFMENTCYAYAGCGIVADSDCRSEFDETKIKLKTILEAL

SEQ ID NO: 94129 - protein, 391 aa, Lactococcus lactis
  misc_feature (1)..(391): tr|A0A2N5WEQ8|A0A2N5WEQ8_LACLL Isochorismate synthase M enF OS=Lactococcus lactis subsp. lactis OX=1360 GN=menF PE=4 SV=2
MLSYVIIFMVEKMNYIKINLKLNNPLAFWANFSESERFFWFDPQKETFVIGCERLKAIDLEHDKFSDYPYLFHSQTFFDDIKGELWENFGGETIAFKHYFVVNKENSYTLTCDSPREISEITIPKFKHQLTEKASDFSAWQELFYAIQKNFADGKSRKIVASRELEFTSQTSFELESIIQNLLDNNPNAFIFAYQKGKRIFLGASPEILVQKENDQLLSYALAGTFPKTMENAGQKLLTDPKNLLEHDIVVQKIKRNLLEKAETVTVGTTELMELKNVYHLRTILSAKNSELSLIDWTKQLHPTPALGGEPRHEALEFLRKHENHERGLYAAPLGLIDSKGNGTMIVGIRSALIVDKKLYAYAGCGIIPSSDALEEFRETKVKLKTILEAL

SEQ ID NO: 94130 - protein, 378 aa, Lactococcus sp.
  misc_feature (1)..(378): tr|A0A139MIU6|A0A139MIU6_9LACT Isochorismate synthase / Menaquinone-specific isochorismate synthase OS=Lactoco ccus sp. DD01 OX=1776443 GN=LACDD01_00042 PE=4 SV=1
MNYRRINLKLEHPLAFWSAFPDPSERFFWYDSQKQTLIIASQRLQAVQEQDIANYPYVFYSQSFFDEVNDELWQDFGNEIVAFKHYFVQTPTESYVLSCDSLPEITDEKGSKLSNSYTEEASDYQEWQSLYQKLQENIAHGKTIKIVASRQIKFTSEQTFKIEPILERLIENNPSAFIFAYHKAGKTFLGASPEILVQKEGNHILSYALAGTVPRSLAHGDTRLLQDPKNLHEHQIVVQKIKDKMLEKSPHVQIGKTGIMALKNVFHLRTLLSTVDTSHSLIDWAKHLHPTPALGGQPSKAALDFLRANEKHERGLYAAPLGLIDAQGDGTLIVAIRSALFDGKTCYAYAGCGIVAASDCQAEFDETKIKLKTILEAL

SEQ ID NO: 94131 - protein, 474 aa, Lacunisphaera limnophila
  misc_feature (1)..(474): tr|A0A1D8AWV8|A0A1D8AWV8_9BACT Salicylate biosynthesis isochorismate synthase OS=Lacunisphaera limnophila OX=1 838286 GN=pchA PE=4 SV=1
MKTPPVNPTGSATPEALRGFLAQCAAEARSVGRPQLVSISMAVDNLDPLAVLESIFEPGEPHFYAERPAAGFGVAGAEVAVEFNAAGADRFAAARAFIDRTLADTIAVGPLAEPFAGPHFFFAAGFADDAPAGGAFPALRVQVPRWQVARRGDGTIAVANVLLPGDAPVDLVTAKIWRAHGKFGAFDYSRAKQKARPSAPQRAEEIGGAEAYPMAVRQALAEIARGDYQKVVLARALRYTTAEEFHPMGVLNHLRQRYPECYSFSIANGRGQSFIGASPERLVRVAGGRMHTAALAGSAPRGETASEDAAWAQALLQSEKDLREHRLVLDSIVGRLAGLDLKLEHAAQPRLLGLANVHHLHTPISASLPAGVDILDLVARLHPTPAVGGAPQAPALAALQRLEAFPRGLYAGPQGWVDHQGGGEFFVGIRSALIDGRTATAYAGAGIVAGSEPEKEFAETDLKFNALIGALTQS

SEQ ID NO: 94132 - protein, 498 aa, Lacunisphaera sp.
  misc_feature (1)..(498): tr|A0A4Q1CC79|A0A4Q1CC79_9BACT Isochorismate synthase O S=Lacunisphaera sp. TWA-58 OX=2508720 GN=ESB00_12845 PE =4 SV=1
MTRLTDQCRTCHSERSEKSRAISRMKTPPVNPTGSATPEALGAFFAQCAAEARTAGRPQLVSISVVVDNLDPLAVLESIFEPGEPHFYAERPAQGFGVAGAEVAVEFTAQGARRFADAKAFIAATLANTIAVGPLAEPFAGPHFFFAAGFADEAAPGAAFPSLRLFVPRWQVARMGDSTVAVANVLVAADAPLEMLTARIWRAHAKFGAFDYSRAKQKDRPSAPRMAEEIGGSGSYQRAVAQALTEIARGDYQKVVLARALRYTTTEEFHPMGVLNHLRQRYPDCYSFSIANGKGQSFIGASPERLVRVAGGRMHTAALAGSAPRGQSASEDAAFAQGLLHSEKDLREHRLVLDSIAGRLADLGLQLEHATQPRLLGLANVHHLHTPVSASLPAEAHILDLVARLHPTPAVGGAPQEPALAAMRRLETFPRGLYAGPQGWVDHRGGGEFFVGLRSALIDGRTATAYAGAGIVAGSEPEKEFAETELKFKALLEALTQS

SEQ ID NO: 94133 - protein, 395 aa, Lampropedia puyangensis
  misc_feature (1)..(395): tr|A0A4S8FD20|A0A4S8FD20_9BURK Isochorismate synthase O S=Lampropedia puyangensis OX=1330072 GN=E9531_01185 PE= 4 SV=1
MTISATSPSQSSPDWLLNQLSHRDIFFASAQHQLRSHNHAEDLHAYAPITSASVNALFAQARSRGQTTPTLFGLIPFDTQLPASLTLPLHVQHTLSPNDALTIGANSAQVSPSVLSKTPVPAPEVYGQMVERALELFAQGDVKKIVLARAMDIALDGAIDPEHIMRDLLTRNRHGYTFNLPIWAEDAQSQASMMGASPELLVRREGEMVYINPLAGSIPRHSDPVIDQQRHEGLAASEKDLREHGYVVSDIARILAEHCTELDVPETPSVIGTDALWHLSTFITARLKSPQMSALDLGLALHPTPAMCGYPTAQAFASIQALEPFAREYFAGLVGWQKENGDGEWALTIRCGRYDGQRSFRLYAGAGTVAGSDPVSEIRETETKMATFLRAITKS

SEQ ID NO: 94134 - protein, 397 aa, Lampropedia sp.
  misc_feature (1)..(397): tr|A0A4S5BS55|A0A4S5BS55_9BURK Isochorismate synthase O S=Lampropedia sp. YIM MLB12 OX=2562762 GN=E8K88_03365 P E=4 SV=1
MSTATSPDLPASNEWLLDAFANRDAFFASPAHQLRSQHGSADLHAYAPISASLVEQLFAQANAQGQHNAVLFGLIPFDVTQAASLTIPQKVQHVASPANANAITPTPSTANTASPAVTSKQPVPAPELYGQMVEQALDLFAQGDVKKIVLARAMDVTLSGTIDQAHILRDLLARNRHGYTFSLPIWNDGAASQAAMMGASPELLVRREGDMVFINPLAGSIPRHSDPALDQERKDGLAVSEKDLREHGYVVSDITRILAEHCTDLQIPERPSVIGTDALWHLSTFITARLKNPAMTALDLGLALHPTPAMCGFPTASAFAHIQALEPFERDYFAGLVGWQKENGDGEWALTIRCGQYDGKQVFRLYAGAGTVAGSDPASEIRETETKMATFLRAIAK

SEQ ID NO: 94135 - protein, 411 aa, Larkinella knui
  misc_feature (1)..(411): tr|A0A3P1CL95|A0A3P1CL95_9BACT Isochorismate synthase O S=Larkinella knui OX=2025310 GN=EHT87_17385 PE=4 SV=1
MQFLTHLSSTVQTQQTSHSVWQAAVQAGYPAALWRLPNRTDRELIIDSSGSVSTVVMDLEELPMGFAVSPFINPETENTLFLKADFYWRFDENGNILASQNQLATDHPAFDSLFKNNPKTVKNNLAPTVNIVQATDNQQQQFEETVGRAIRQMERGKFRKVVLSRTKTIRFEEQPAIPTLFNRLCAAYPNAFVSAVYLPDRNQIWIGATPERLVSVDAGGIFRTVALAGTQSAFDGEGRPKRTADAPWTQKEIEEQALVSRYIIGCFKKIRVREYIEEGPKTVIAGNLMHLRSDYSVDTQAVNFPQLGTVMLRLLHPTSAVCGMPREAAQEFILTNETHQRELYSGFLGPVNIYRTEGPETHLFVNLRCMKLEGQEGTLYAGAGLTEDSSPAKEWRETELKCDTMLAIVKS

SEQ ID NO: 94136 - protein, 411 aa, Larkinella sp.
  misc_feature (1)..(411): tr|A0A368JFT7|A0A368JFT7_9BACT Isochorismate synthase O S=Larkinella sp. ZZJ9 OX=2315727 GN=DUE52_25995 PE=4 SV =1
MQFSTHLSSTVQTQQTSHSIWQGAVQAGYPAALWRLPNRTDRELIIDASGNVATVAMDFEELPMGFAVSPFVNPDAESTFFLKADFYWRFDENGTILAAQNKLPTDHPAFESLFRTDSKTAGKETISVVKVDKSTQNQQLDFEETVSRAIRQMERGTFRKVVLSRTKAIRFEEQPDIPTLFNRLCQAYPNAFVSAVYLPDRNQVWIGATPERLVSVDADGIFRTVALAGTQSAFDSEGRQKRPADAPWTQKEIEEQALVSRYIIGCFKKIRVREYIEEGPRTVVAGNLMHLRSDYSVDTQAVNFPQLGTVMLRLLHPTSAVCGMPRETAQDFILQHEAHAREFYSGFLGPVNIARQEGPETDLFVNLRCMKLEGQEGTLYAGAGLTEDSSPAKEWRETELKCDTMLSVLTK

SEQ ID NO: 94137 - protein, 395 aa, Lautropia mirabilis
  misc_feature (1)..(395): tr|E7RUE5|E7RUE5_9BURK Isochorismate synthase OS=Lautro pia mirabilis ATCC 51599 OX=887898 GN=HMPREF0551_0111 P E=4 SV=1
MTTSTSSTQAMPVRAEFIFSSGSRELHAHGVRETITVPAVNGDAADSPLQQQVRAAFDRARKAGMENPVVVGAIPFDVNQPSQLYVPETAAWQEADPSTHAQAMPMPALRSMDTVPDQHGFQQGVANAIAAFPAEGIHKVVLSITSRLHFTEAVPVAALRTNLRRLNPSGYLFQVPLPGNIHLVGVSPELLIEKHGATVQSNPLAGSARRQADPAEDQATAERLAASGKDHHEHQFVTADIQARLAPLCTALDVPARPSLINTAALWHLSTRIRGELQDPQTNALQLACCIHPTPAVCGTPRDAAHALIRRIEPYDRGLFTGIVGWMDAQGNGEWVVTIRCGVLHDKWLQIYAGAGIVDASDPQSEWNEVQTKQGTMLRACGLGEEQAAPIPTAA

SEQ ID NO: 94138 - protein, 390 aa, Lautropia sp.
  misc_feature (1)..(390): tr|A0A3R8NAX1|A0A3R8NAX1_9BURK Isochorismate synthase O S=Lautropia sp. KCOM 2505 OX=2490857 GN=EHV23_13870 PE= 4 SV=1
MFSARDDLDNPFARHGHSMPADAAFLFSHGPHTLRTAGVQEVIQTPADGSASPDGPLQQHIREAFGRARSAGIARPIVVGAVPFDVHQPSCLFVPQQAEWLSSWDTPVVSSMPGLKSLVTQPDQAGFEAGVARAAAACAAHAPAKAVLAITSRLTFTAPPFVEALRSRLRQQNPSGYLLQVPLPDGGYLVGVSPELLIRRHEYTVQSNPLAGSARRLPDPEADRIHADRLSASSKDHHEHRFVTDDIRARLSPLCATLQVPEAPSLISTAALWHLSTQIHGTLQDPPANALQLACAIHPTPAVCGTPRDAANALIRSIEPFDRGLFTGFTGWMDADGNGEWVITIRSGVLHGEHLQIYAGAGIVAESDPHSEWNEVQTKQRTMLHACGIS

SEQ ID NO: 94139 - protein, 431 aa, Leclercia adecarboxylata
  misc_feature (1)..(431): tr|A0A5B7XFV2|A0A5B7XFV2_9ENTR Isochorismate synthase M enF OS=Leclercia adecarboxylata OX=83655 GN=menF PE=3 S V=1
MHSISTALEGLCHQLAADFPEAPGLHCLDVSFPLNDAFDPLGWLNAQQLYPQFYWQQRNGDEEYAALGAIKHFPSLSAARQFLHLYPHAPDLRVVGVNAFDPAQGSLFLPRLLWQRFGGTATLRLVLWSDTSLKTEAIRAREFVRSLAESQPVAPVTQTVVSETHQPDKAGWLQLITRATDAIARGEFDKVVLARATDLQFNQPVNPAALMAASRQVNFQCYHFLMRSDASQAFLGSSPERLWRRRAMLLRTEALAGTVASHPDDARAARLGNWLMNDDKNQRENMLVVEDICQRLQRDNGVLDVLPPQIVRLRKVQHLRRCIWTTLQQPDDEQCLLRLQPTAAVAGLPRQAAWEFIARNEPFDREWYAGSAGYLSLAQSEFCVALRSARVQENAVRLYAGAGIVSGSDPEQEWQEIENKAAGLRTLLLKD

SEQ ID NO: 94140 - protein, 431 aa, Leclercia sp.
  misc_feature (1)..(431): tr|A0A345C7Z8|A0A345C7Z8_9ENTR Isochorismate synthase M enF OS=Leclercia sp. W17 OX=2282309 GN=menF PE=3 SV=1
MHSISTALKGLCQQLADDFPDTPGLHYLDVSFALNDAFDPLGWLNAQHIYPQFYWQQRNGDEEYAALGAITHFPSLSAARQFLNRYSHAPDLRVVGVNAFDPRQGNLFLPRLLWQRFGGTASLRLVLWSDTSLKAEVQRAREFMQTLAESQPVAPVTQAVVRETHLPDRAGWLQLITRATEAISRGEFDKVVLARATDLQFNEAVNPAALMAASRQVNFQCYHFFMRTDASRAFLGSSPERLWRRRGLLLRTEALAGTVASHPDDAHAARLGNWLMNDDKNQRENMLVVEDICQRLQRENGVLDVLPPQIVRLRKVQHLRRCIWTALQQPDDEQCLLRLQPTAAVAGLPRQAAWDFIAHNEPFDREWYAGSAGYLSLAQSEFCVALRSASVEESCVRLYAGAGIVSGSDPDQEWQEIENKAAGLRSLLLKD

SEQ ID NO: 94141 - protein, 421 aa, Leifsonia flava
  misc_feature (1)..(421): tr|A0A4Y9R2T1|A0A4Y9R2T1_9MICO Isochorismate synthase O S=Leifsonia flava OX=2561933 GN=E4M00_08215 PE=4 SV=1
MVTATESRVRALRIETTPVDGIRSLLFFAEQRSPLLWMRRGEGFAGAGEALRLEFSGPTRFTDAAAAWAEVAGLAQVHDSVGLPGTGLVAFGTFGFADDSSATSVLIVPEIIVGRRGSHSWVTRVSAVDAADGSDASARADDPVATAFGDDYRVTFRPGELPPAAFMEAVASAVRHISASDARKVVLARDLVGTVPSGSDLRRVLAELALGYPDCWTFSVDGMLGSSPETLVRSEAGTVSARVLAGTAPRGRDAVTDENVAASLSRSQKDLAEHGFAVQSVLATLGPHTTRLQNSQPFTLQLPNLWHLATDVEGVLHDGSTSLDLVAAMHPTAAVAGTPTDAALTIIRELEPFDRGRYAGPVGWIDAHGDGEWAIALRCAQVDADDSVRAYAGCGIVADSVPAEELAESRIKFRPIVEVFA

SEQ ID NO: 94142 - protein, 417 aa, Leifsonia rubra
  misc_feature (1)..(417): tr|S7XM81|S7XM81_9MICO Isochorismate synthase OS=Leifso nia rubra CMS 76R OX=1348338 GN=ADILRU_0478 PE=4 SV=1
MTNQREPLTIVTRPSGDIDRILDWITPDHPLAFVRNGEGIVGVGELLRREFRGADRFAAAAAAWSELTRTAIVHDSVNRAGTGLIAFGSFAFADSSSSVSVLIIPRVIVGNREGSHWVTTISAGEANTMPETTDALATLHRHPHGAAVHVSFAPGDMSTTAFTTAVTAALHEIALSRAEKLVIARDQVAMLPTGADLRVPIAALATRYPDTFTFAVDGLIGSSPETLVNVHNGTVSARVLAGSAARGDNHSSDEQAAATLTGSLKDQQEHALALASVMDALRPLSLELHAASSPFALQLPNLWHLATDIEGQLAGRSSALDLIGILHPTAAVAGTPTPAALQIIDSLEGFDRGRYAGPVGWVDADGNGEWAVALRCAQVDGTRITAYAGAGIVTGSNAERELAETELKFRPIIEAFA

SEQ ID NO: 94143 - protein, 431 aa, Lelliottia amnigena
  misc_feature (1)..(431): tr|A0A3S5XSU9|A0A3S5XSU9_LELAM Isochorismate synthase M enF OS=Lelliottia amnigena OX=61646 GN=menF PE=3 SV=1
MHSISIALERLGDFLQQDIPATPGLRHFDVSFPLNDAFDPLAWLGAQIAYPQFYWQQRSGDEEMAALGVAEFFSTLSAARQFLSDGHASPDTRICGLNAFTSGQSHLFLPRLLWRRTGGAATLRLTLSSEVSLQDDARCALVFLQQLQAIRPITTLSSHIVRETHLPARPEWLSLVSQATDAIARGEFEKVVLARATDLQFDQRVTAIALMAASRRINHNCYHFCMMFDAQNAFMGSSPERLWRRRGKRLRTEALAGTVASHADDAQSHRLGEWLLNDDKNQRENMLVVEDICQRLQHHTQALEVLPAQIVRLRKVQHLRRCIWTELKTADDEQCLRLLQPTAAVAGLPRDPARAFIQRKEPFEREWYAGSAGYLSPEQSEFCVTLRCARVSDTAVRLYAGAGIVSGSVPEEEWQEIENKAAGLRTLLLMD

SEQ ID NO: 94144 - protein, 431 aa, Lelliottia nimipressuralis
  misc_feature (1)..(431): tr|A0A4Q0W862|A0A4Q0W862_9ENTR Isochorismate synthase M enF OS=Lelliottia nimipressuralis OX=69220 GN=menF PE=3 SV=1
MHSISIAIERLGQFLAQAFPPTPGTRHVDVSFPLNDAFDPLAWLGAQVAYPQFYWQQRSGEEELAALGAVHHFSSLSLARQFLQTHELSDDTRICGLNAFAPEKSHLFLPRLLWLRLGGVATLRLNLSSDHSLADDAQQARAFLQQLSPARTITPLAPHKVRETHLPEKPEWLRLISRATETIASGAFEKVVLARATDLHFDRGINAIALMAASRRLNFNCYHFCMVFDAHSAFMGSSPERLWRRRGNHLRTEALAGTVASHPDDRQAQYLGEWLLADDKNQRENMLVVEDICQRLQHHTQALEVLPAQIVRLRKVQHLRRCIWTELKHPDDEQCLQLLQPTAAVAGLPRLSARDFIQTYEPFDREWYAGSAGYLSLAQSEFCVALRSARVSDSAVRLYAGAGIVSGSVPEDEWQEIENKAAGLRTLLLMD

SEQ ID NO: 94145 - protein, 431 aa, Lelliottia sp.
  misc_feature (1)..(431): tr|A0A2S5C4C0|A0A2S5C4C0_9ENTR Isochorismate synthase M enF OS=Lelliottia sp. 7254-16 OX=2080842 GN=menF PE=3 S V=1
MHSISVAMERLCSFLAQDFPATPGVSHIDIAFPLNDAFDPLAWLGAQACYPQFYWQQRNGEEELAALGAVQHFSSLSLARQFLQNPSLPDDTRICGLNAFTPEKSHLFLPRLLWLRLGGVATLRLNLASDHSLQDDAQQARDFVQQLCNLKPIASLSLNKVRETHQPAKTEWLRLVSQATDTIERGAFDKVVLARATDLHFDRGVNAIALMAASRRLNLNCYHFCMVFDAHSAFMGSSPERLWRRRGKHLRTEALAGTVASHPDDGQAQRLGDWLLADDKNQRENMLVVEDICQRLQHHTQALEVLPAQIVRLRKVQHLRRCIWTELHDANDEQCLQLLQPTAAVAGLPRLPARDFIQAFEPFDREWYAGSAGYLSPAQSEFCVALRSARITDCAVRLYAGAGIVSGSVPEEEWQEIENKAAGLRTLLLND

SEQ ID NO: 94146 - protein, 98 aa, Leminorella grimontii
  misc_feature (1)..(98): tr|A0A485A9K4|A0A485A9K4_9GAMM Menaquinone-specific iso chorismate synthase OS=Leminorella grimontii OX=82981 G N=menF_1 PE=4 SV=1
MKQISELVTQLHQRLQDVARPEPGWDRVELPLSFTARSLLGWLSAQSLFPQFYWRQRDGREEFAVCGEVVRFHDARAAYRFLVQSERSDMRVWGAERL

SEQ ID NO: 94147 - protein, 438 aa, Leminorella richardii
  misc_feature (1)..(438): tr|A0A2X4UJL7|A0A2X4UJL7_9GAMM Isochorismate synthase M enF OS=Leminorella richardii OX=158841 GN=menF PE=3 SV= 1
MKQISELVKQLHQRLQDAARPEPGWARVELSLPLTVRSLLGWLSAQSLFPQFYWRQRDGREEFAVCGEVVGFHDARAAYRFLVDSGRQDMRIWGLNAFDRVDTSETAVPKGALFLPRVELLRDEQGVRLAVNLYSESSLADDVQRAQKTLTALVPSKPLPSINASVLDVHHQPEKEGWCSLLRQALSEIANKRFDKVVLARRSTLTLNKPLNPAAFLNASQKVNHRCFHFMMRMDDEKAFLGSSPECLFLRKGQRLTTEALAGTVAGSPDDEKAKALGEWLMQDKKNQHENMLVVDDICQRLQGGTQAIDVLPAEIVRLRKVQHLKRAIHATLAEVDDADTLQRLQPTAAVAGLPREPARQFIVQNEPFTRGWYAGSAGYLSAGRSEFAVSLRSALIEDDKIHLYAGAGIVAGSDPEEEWLEIENKAAGLRTLLEQEA

SEQ ID NO: 94148 - protein, 467 aa, Lentibacillus amyloliquefaciens
  misc_feature (1)..(467): tr|A0A0U4G3Q4|A0A0U4G3Q4_9BACI Isochorismate synthase M enF OS=Lentibacillus amyloliquefaciens OX=1472767 GN=me nF PE=3 SV=1
MLEVKETGLQSMLEKAISEAKENHTARMISMTKKVNKTNPLLFIEAGKKLSVDRTFWSSTSENFSIAGIGCAHEINAKSNRMEEAEEAWQKLRDEAIIHNPYKTSGTGLVTMGGMSFDPLMQKTSLWKNFSHLSLTIPEMLLTQSDDNCYLTTNVKVNADDQAAELAQRLNKMERMLLNPSINLPGEVGIEMKQEIDPETWKQTVTYATDYIKQNYAKKIVLARKLFVKLSDEAAVSSVLKKLIEQQPNSYVFAFERNGDCFLGASPERLVKQENDEVLSTCLAGTAPRGKTKEEDDRIAHSLLYDEKNRSEHDFVVKMIRQSMEHYCRAVNVPDKPVIYPLKNLQHLYTPVTAVLNERYSIFDIIERLHPTPALGGVPRDESLAFIREHEQLDRGWYGAPVGWMDSNRNGEFAVAIRSGLIQGDKASLFAGCGIVQDSNPDEEYKETGIKFLPMLSVLGGGNHESH

SEQ ID NO: 94149 - protein, 461 aa, Lentibacillus halodurans
  misc_feature (1)..(461): tr|A0A1I0WTJ7|A0A1I0WTJ7_9BACI Isochorismate synthase M enF OS=Lentibacillus halodurans OX=237679 GN=menF PE=3 SV=1
MIEVSETSLQSMLEKAVNEAKINHTSPLMSMTKEIKKIDPILFFEAAKKSAMDRTFWSSTADNFTVVGVGSAYDLIAETNRIEQTEAVWKKLLDEAIIHNPYETPGTGILALGGMSFDPTKQKSVLWKNFPHLAFTIPKFMLTEWEDACYLTMNIQVGKDDHPLQLADKLKRTEDMLLNTSGYLPEEPDIDKTEEVAPTEWKRTVKYATDFIKEHSADKIVLARERLVRLTDEAVVSTTLNKLTDTQPNSYVFAFERAGDCFVGASPERLVKQDKNDVLSTCLAGTAPRGKTKAEDARIGTSLLHDEKNRREHDFVVKMIRQSMENFCSSIDVPEEPVIYPLKNLQHLYTPVNATLKEGYSIFDIIGELHPTPALGGVPRNKSLAFIREHERVDRGWYGAPVGWLDSNRNGEFAVAIRSGLIQGNQASLFAGCGIVKDSEPEAEYEETNIKFMPMLSVLGG

SEQ ID NO: 94150 - protein, 461 aa, Lentibacillus persicus
  misc_feature (1)..(461): tr|A0A1I1WF38|A0A1I1WF38_9BACI Isochorismate synthase M enF OS=Lentibacillus persicus OX=640948 GN=menF PE=3 SV =1
MIEVQEASLQSMLEKAINEAKQNHTARIMSMTKQINKADPIAFIGAGENLSMDRGFWGSTSEGFYIAGVGCAHEITAGSNRMDEAEKSWQKLRDEAIIHNPYKKPGTGLVTMGGMSFDPLSQRTSLWNNFPPLSLTVPEIVLTRSAENCYLTINVKVNGIDKASEITQRLNKLERSLLTHSSALPDDVTIEKKQEVDPESWKQTVRHATEFIKANKADKIVLARKLLVKLSDKSAVSTILYNLIEQQPNSYVFAFERNGDCFLGASPERLIKQEQEEVLSTCLAGTAPRGQTKEEDEQIAQSLLHDEKNRSEHEFVVKMIRQSMVHYCRAVNIPDNPVIYPLKNLQHLYTPVKAVLKEKHSIFDIIDKLHPTPALGGVPTEESLAFIREHEQLDRGWYGAPVGWMDSNLHGEFAVAIRSGLIQEKQASLFAGCGIVRDSDPDEEYKETGIKFMPMLSVLGG

SEQ ID NO: 94151 - protein, 461 aa, Lentibacillus salicampi
  misc_feature (1)..(461): tr|A0A4Y9ABK8|A0A4Y9ABK8_9BACI Isochorismate synthase M enF OS=Lentibacillus salicampi OX=175306 GN=menF PE=3 S V=1
MIEVKETTLHTLLDQAVNEAKYNHTTPLLSMTKKIDDFNPLLFFEAAEQLPMNRTFWSSTAEAFYIVGVGSAYDLADGADSIEQIERNWRKLVDESIIHNPYGTPGTGLLTIGGMSFDPTIRKSERWKKFSHQSFLIPALMLTKERDTCYVTFNIQVTEDDHPEQLAKRVKWMENRLFDHSGYIHGENGVESTADVAPEEWKETVKRATDYIKQDDADKIVLARELQVKLRDNAAITPILNNLIETQTNSYVFAFERDGDCFVGSSPERLVKQEKDVVLSTCLAGTAPRGETNKEDDRIGNTLLQDEKNRSEHDFVVRMIRQSMENYCLAVDVPDKPVLYPLKNLQHLYTPVTARLKEGYSIFDIVGKLHPTPALGGVPREKSLAFIRDHERLDRGWYGAPVGWLDSNSNGEFAVAIRSGLIQGDQASLFAGCGIVRDSDPEAEYEETKIKFLPMLSVLGG

SEQ ID NO: 94152 - protein, 463 aa, Lentibacillus sp.
  misc_feature (1)..(463): tr|A0A549YMA7|A0A549YMA7_9BACI Isochorismate synthase M enF OS=Lentibacillus sp. NKC851-2 OX=2584959 GN=menF PE =3 SV=1
MIEVKLKSFESLLSKAITKAKTTEYNQLVSMTEEIHEVDPVRFFASAKTLSMDRVFWTSTSEQFSIVGVGCAWNIELEENRTETIENHWQQLLDEAIIDNPYQVPGTGVVGLGGMSFDPSVRKSSLWNKFSHRSFQVPNVLLTKHNARNYLTINLQVKANDDLQELTEWVEQSKDILVNSSERLPECAGIARQQEIAPDKWKQTVKLAADKIKAHAAQKIVLARELRVTMTDDVQVASILRNLLEKQPDSYVFAVERAGDCFVGASPERLVKQDNNQLFSVCLAGTAPRGKTEAEDREIGENLLHDDKNRSEHDFVVKMIRQSMEAYCDAVHVPETPVIHPFRNLQHLYTPVTAQLKRGYSIFDIIEKLHPTPALGGVPREASKDFIRKHEQLDRGWYGAPVGWFDSNRNGEFAVAIRSGLVQGDKVSLFAGCGVVKDSDPEAEYKETMIKFRPMLSALEGRQ

SEQ ID NO: 94153 - protein, 460 aa, Lentisphaerae bacterium
  misc_feature (1)..(460): tr|A0A3M0Z585|A0A3M0Z585_9BACT Isochorismate synthase O S=Lentisphaerae bacterium OX=1932692 GN=D6820_09615 PE= 4 SV=1
MNGILSSSAKTSWTDWLGTLRVELSQRSGLRADSCELFGPDLAPDQIFLLLAGVSLTPLVYLEYTSLEQQRVWLIAGGGRISRKGCACADRSSPPDSHFLAFLPFPGATTDCEVKCDPWQARAQPCRLYPQFIFQGSVTDGSTRFLYLRPPALSPDSSSLLALLDLFEEAASASQAMASSTLDMNLVSLVPSQQQWFRYLQTIQQAIAKDELQKVIAARFSQYSLSDPVQAHLAFLRLRSQTPTANHYFVSLDQDSCWFGASPEILYQRSGSHIMTQAVAGTRPFQNHHERDRQAYFDLLHQDKEHREHAIVVRAIEEKLIQLGVTLEEQNLRHVIRIGNLLHLCQYIHGHLPPDFDEKNLCRALHPTPAIGGYPQDKAIAFITRHEPFYRGYYGGLICLHTPDHTLSVVTIRTLLFRGDSLYTFVGAGITAESDPSREWEELQTKELALLSWNRESGRE

SEQ ID NO: 94154 - protein, 460 aa, Lentisphaeria bacterium
  misc_feature (1)..(460): tr|A0A3D3JUN4|A0A3D3JUN4_9BACT Isochorismate synthase M enF OS=Lentisphaeria bacterium OX=2053569 GN=menF PE=3 SV=1
MDLVQEPVQEKFQLAEKIQQLLTSNGDKAAAGPSLVRVTVDIRPTDPLTWLAVQPHDVKTYWCDRERRLEIAGVGIAAQEPTSTDTSEMLQRLRSQLTTDNGTRWLGGFSFDGRDATQNDTDWEWYGRGRFIVPRFEVIAENGVQHLACNLRCDSNGLTFDDIQSALNDLDAIRHPAATADMRLPAVLTRDDTPGLKDWTHNVEAALEAISRGHFDKVVLARQTIFHLDGSLAAPALLHGLREDTHHCFLFCFQPRRDIAFFGATPELLYRRIGRQLTCEAIAGTQPRGESQNEDLTLGRELLASEKDRREHRFVAEHIRERLVLLGESTDFDEPTLLRLASIQHLQQHFDTGLGAEVSDADILAALHPTPAVGGSPRNTALSWIKEFEPFCRGAYAAPVGWIDRDNAEFAVGIRSALYQNDALSLFAGAGIVDGSVAAREWAELDSKIETFRRLLAAPY

SEQ ID NO: 94155 - protein, 410 aa, Lentzea sp.
  misc_feature (1)..(410): tr|A0A563EKW6|A0A563EKW6_9PSEU Isochorismate synthase O S=Lentzea sp. FXJ1.1311 OX=2591470 GN=FKR81_31215 PE=4 SV=1
MTSAPTSRARQRLRVLTRRDDAEDLLARLPDPDHALAWVRDGSGLVGWGEAARLEVRGPDRFEQADRWWREFVEHLDVEDELGVPGSGPVAFVSMAFADEPGDSVLIVPEVVIGRRNGDTWVTTIGSSEAEPAVAPMRRPATVRYANGQLPVTAYREAVREAVARMRQGELDKVVLAHDLVAVTDKRLDQRFVLRGLARRYPECWTYAVDGLVGATPELLLRRTGSVVDSRVLAGTTWPHDGMSDQELADSLMSSDKDLEEHNYAVTSLADTLRPYCTTMSVDGPSVLRLPNVSHLSSDVIGTLGSSASLLRLGAAVHPTAAVGGTPTLDATMLISQLEGMDRGRYAGPVGWIDGNGDGELGIALRCAQIEGSTARLFAGCGVVADSDPDTEVQEAHAKMLPMREALEGL

SEQ ID NO: 94156 - protein, 473 aa, Leptolyngbya sp.
  misc_feature (1)..(473): tr|K9ELU1|K9ELU1_9CYAN Isochorismate synthase family pr otein OS=Leptolyngbya sp. PCC 7375 OX=102129 GN=Lepto73 75DRAFT_6829 PE=4 SV=1
MTVAPYQSDLFKRCKEIYGFLSDCQRQATYSQHAKLANFTVPISPIEPWLALQQLEKTYPIHFYYSTPQYTLLGLGITVAQQAAGPDRFERMQQFVDVWKRRILSSNQSGSIIQPYFLCGFTFFEQANGLFDPAQVFVPQLQILQRNGQTTASLNYLIDDAVNITRVVDDIRQQIQAIETAAEKTSHTTFTTSSRTLQTPKVIRDVGNFEQMVGSVLPALKRSTLHKVVLADALDVLSASPFNIPASLKTLGIAYSDCCIFSFSNGEGSVFIGASPERLLSITTSVNGKQLTTDALAGSAPRGDTLNSDQLIAEQLLNNPKERYEHQVVVEFIIEQLIKLGLNPQFAVSPEILRLANIQHLHTPIQASLPHNIKPLTLVKTLHPTPAVAGLPRPSASQLLKTTESFDRGLYASPIGWIDAKGNSEFVVGIRSALIQGRQARLFAGAGIVAQSNPRSELAEVKLKLQALLGALV

SEQ ID NO: 94157 - protein, 444 aa, Leucobacter sp.
  misc_feature (1)..(444): tr|A0A373DJ51|A0A373DJ51_9MICO Isochorismate synthase O S=Leucobacter sp. wl10 OX=2304677 GN=D1J51_12730 PE=4 S V=1
MTSDRDVPRLRAITRTLAATPDLLSLADPRHPLLWYRGDRACVGVGEALRLTFSGPARFAEAAERWREIAAAAEIDDPVRMPGTGLVALGSFTFANRSAAESVLVVPRTLVARHRDRWWITEVAVLSSDDPPPSPDALELPAPQPPGSWAGTAFAAPRAGSRAGEPVDRTAPDSAAVDAYLSGVRQAMHRISQGDAEKIVLARQVSGGIAADDDLRVPLRRLAERYLDCWTFAVDGMLGASPETLIRSTGGAVSARVLAGTRGRHPESAGRDAQARDELLTSAKEQHEHAFAVQSVVTALSPHVRELRTSEEPFTLRLPNVWHLATDLGACLGERSSSLELVGALHPTAAVAGTPTAAAVDAIAELEPFDRGRYAGAVGWIDAAGDGEWVIALRCAQVGAADPETGERSVVASAGGGIMADSDPEHELGETVSKLRPITEAFAE

SEQ ID NO: 94158 - protein, 441 aa, Leucobacter triazinivorans
  misc_feature (1)..(441): tr|A0A4P6KG54|A0A4P6KG54_9MICO Isochorismate synthase O S=Leucobacter triazinivorans OX=1784719 GN=EVS81_10405 PE=4 SV=1
MTTDHGVPRLRAITRPLAEAPDLVSLADPEHPLLWLRDDRGCVGVGEILRLTFTGPTRFRDAAAQWRRIAEAAVIDDPVRLPGTGLVALGAFAFADRSAAESVLVVPRILVARHRTSWWITEVSCADAPATSAPLRPEARPQGSWPGTAFGASPTDPRAGAADEPDRETHSDAVAAYLDGVREAGRRISEGEAEKIVLARQLGGTIPRDADLRIPLRRLADRYLDCWTFAVDGLVGASPETLVRSTSGAVSARVLAGTRARHPEDAKRDARARDELLTSAKEQHEHAFAVQSVVTALSPYVRELHTSEEPFTLRLPNVWHLATDLGASLGERSSALELVGALHPTAAVAGTPTSAAVAAIDELEPFDRGRYSGAVGWIDAEGDGEWVIALRCAQVSPADPGTGERAVVASAGGGIVAGSDPEHELGETVSKLRPITEAFAP

SEQ ID NO: 94159 - protein, 396 aa, Leuconostoc citreum
  misc_feature (1)..(396): tr|B1MZ28|B1MZ28_LEUCK Isochorismate synthase OS=Leucon ostoc citreum (strain KM20) OX=349519 GN=LCK_00953 PE=4 SV=1
MQYTFTRPLKSNDEHSLLVMLDTYAISAYFETPNQDKKLFAYGAEKISNDFNNINGEIIFGGQQFNQTYFKDSVLMNGFWFLPTIYVELTESSLTFHSETINDFDSWLIKTKQLLKQQVSILNTQDEEDWPTRTQMLITDLNSDAEVKKVVFGRQRQNQLSRPLYAANLIMALSVQQNTYHVVLKNQNELFVSATPERLVKVSSGYLETAALAGTINRGLTPSEDQLLGESLLSSVKNRQEHAYVVHELKQKLQTMTTCLDVPETPILLKNKQVQHLYTPINGKLAQYGITDIMTALHPTPALGGVPKALALAYINAHEKQPRGLFASPIGYYTGSGDGEFAVGIRSMLINQTTRIATLFAGAGIVADSIAEEEYEETGLKFEPMQQLLKDYNHGE

SEQ ID NO: 94160 - protein, 397 aa, Leuconostoc gelidum
  misc_feature (1)..(397): tr|A0A175CD51|A0A175CD51_LEUGE Isochorismate synthase @ Menaquinone-specific isochorismate synthase OS=Leucono stoc gelidum subsp. gasicomitatum OX=115778 GN=PL111_16 18 PE=4 SV=1
MKYHFSRDLCDSDRAQLNRALDFFNITAYFKTVDGQEELFGFGAQQEADVPNKLNGTMIFGGYPFDQQVVENSKLMNGIWFVPIIFVKITQNIVIFESDTVENFNEWLTKFKTIARSKVVSHVITSELDWTSRTQKLINTIISNDKLKKVVFGRQHQYALSDTLLASTLVHALITQKNTYHVILKYQKEMFVSATPERLVKVTDGAVTTAAVAGTIRRGNTQTEDKLLGDMLLNSHKNQQEHRYVVNSIYQKIQNMTTSLNLPPQPILLQNRQLQHLYTPISARLIKKYTVLDIVNALHPTPALGGVPQKQALDYIRAHERSPRGLFAAPIGYYTSNNSGEFVVGIRSMYINHAAHTATLFAGAGIVSDSNATQEYQETNLKLEPMRQLLKGDVNDN

SEQ ID NO: 94161 - protein, 397 aa, Leuconostoc lactis
  misc_feature (1)..(397): tr|A0A5B8TAH2|A0A5B8TAH2_LEULA Isochorismate synthase O S=Leuconostoc lactis OX=1246 GN=FGL83_07370 PE=4 SV=1
MTYHETRALAQSDLQQLYAALETTEFGAYFATPADDTLRFGIGAIATAKTAQALQGAVVFGAQSFDEQEYPQSELMAGFWFVPEVMVTIAADKITFGSDTVSDFTTWLAQFVPKQPNTVTTSHVTDEVDWIERTENLIDTLAIDQTLAKVVFGRQQTLQLSDTLRLAQIIRALAEQANTYHVVLKRHDELFISATPERLVAMSGGQIATAAVAGTSRRGTDGADDIALGEALLASQKNRIEHQYVVASITTRLQDVTTSLKVPAMPSLLKNKQVQHLYTPITGDIAAHLSVTAIVDRLHPTPALGGVPREAALYYIATHEKTPRGLFAGPIGYFTADNSGEFVVGIRSMYVNQTQRRATLFAGAGIVADSDAQQEYEETGLKFEPMRQLLKDYNHVE

SEQ ID NO: 94162 - protein, 384 aa, Leuconostoc mesenteroides
  misc_feature (1)..(384): tr|C2KKL9|C2KKL9_LEUMC Isochorismate synthase OS=Leucon ostoc mesenteroides subsp. cremoris ATCC 19254 OX=58622 0 GN=HMPREF0555_1185 PE=4 SV=1
MDRSLLNQMLDNVQVSAFFETSDKKSTMYAFGQKKIWSKMPDKTDSIVFGASSFDDQLEAGIMKGFWFEPEFLVLLQDNQLLSSTTSIDDYLMQLSQLKKPQAPQIIDESAETDWQARVQALINEFSVNRSLKKVVFSRQQQITLSAKLVLSKVIPALQKQQDVYHVALKRDTELFITATPERLVKINDNQVETAAVAGTIRRGQIDLEDVKLGKELLNSEKNNQEHRYVVDNIVQQLGSLTNQLHVPNKPFLLKNKQVQHLYTPIQGTLATNISIKDVVGKLHPTPALGGLPRKNALVYIRNYELHPRGLFASPIGYFTKNNFGEFVVGIRSMYVNGRNVRLFAGAGIVAESDSQQEYYETTLKFQPMLELLEELSNDGHTNF

SEQ ID NO: 94163 - protein, 398 aa, Leuconostoc pseudomesenteroides
  misc_feature (1)..(398): tr|A0A5B8T529|A0A5B8T529_LEUPS Isochorismate synthase O S=Leuconostoc pseudomesenteroides OX=33968 GN=FGL85_066 65 PE=4 SV=1
MQKSENHFFKFEREATSNDYQVLNQMLDHFQVSAFFENNTGTQIFYAFGSKNSWQTLPQKVNTLVFGANTFDGQHSKGELMNGFWFEPEIIVSISNGRLQSNDLNLDNILVNYQQISTTKRVKIKNIVSETDWIVRVADLIKNLNDVRCPMDKVVFGRQEMIELSEQIRISSLLEALKKEHGVYHVILKRENEVFVTATPERLAFVSQGEIQTAAVAGTAPRDPDPKRDHELGNKLLHSLKNQREHQFVVDSIKMKLEALTTQLNVPSKPILLKNKQVQHLYTPISGTLSANISVKDLVDNLHPTPALGGVPQEEALQYIAQHEQQPRGLFAGPIGYVTADNTGELVVSIRSMYCDQTHARLFAGAGIVAGSEAQQEYNETALKFEPMLQLLGELMHD

SEQ ID NO: 94164 - protein, 400 aa, Leuconostoc suionicum
  misc_feature (1)..(400): tr|A0A2N9KAK8|A0A2N9KAK8_9LACT Salicylate biosynthesis isochorismate synthase OS=Leuconostoc suionicum OX=1511 761 GN=pchA PE=4 SV=1
MVIIDELIRYRRTLRSIDRSLLNQMLDNVQVAAFFETSDKKSTMYAFGQKKIWSKMPDKTDSIVFGASSFDDQSEAGIMKGFWFEPEFLVLLQNNQLLSSTTAIDNYLMQLSQLKEPQAPKIIDESAEADWQIRVENLINELSVNRSLKKVVFSRQQQVTLSSKLVLSEVIPALQKQQNVYHVALKRDTELFITATPERLVKINDNQVETAAVAGTIRRGQIGLEDVKLGKELLNSEKNNQEHRYVVDNIVQQLDSLTKQLHVPSKPFLLKNKQVQHLYTPIQGTLADNISIKNVVQKLHPTPALGGLPRKEALAYIRNYELHPRGLFASPIGYFTKNNFGEFVVGIRSMYVNSQNARLFAGAGIVADSDSQQEYHETTLKFQPMLELLEELSNDGYTNF

SEQ ID NO: 94165 - protein, 437 aa, Limnobaculum parvum
  misc_feature (1)..(437): tr|A0A2Y9U149|A0A2Y9U149_9ENTR Isochorismate synthase M enF OS=Limnobaculum parvum OX=2172103 GN=menF PE=3 SV=1
MKQISELVKQLHKRLQEVARPEPGRERITVSLTLQQRTSLLSWLAAQPIFPQFYWRQRDDLEEAAVCGEVIRFNDADSARYFLMTNDVADMRIWGLNTFDQVETPSLNTPKSALFLPRIELLRDMDGGKLVVNLYSETSLADDVAIAQKTIEQLTTSRPLPVLNVNVNSVQHQPEKQGWCDLLNQALEAIQQGQFEKVVLARKSTLSLNEPLNPAAFLNASEKVNHHCFHFMMRMNDKTAFLGSSPECLFLRVGQHLTTEALAGTVASSSDNQQAKQLGDWLMQDKKNQHENLLVVDDICQRLHGGILAIDVLPAEIVRLRKVQHLRRCIHAELAVANDADSLQRLQPTAAVAGLPREPARQFILQHEPFTRDWYAGSAGYISLNQTEFAVSLRSALVEGSNIHLYAGAGIVAGSDPEQEWLEIENKAAGLRTLLEE

SEQ ID NO: 94166 - protein, 491 aa, Limnospira indica
  misc_feature (1)..(491): tr|H1WAT9|H1WAT9_9CYAN Menaquinone-specific isochorisma te synthase OS=Limnospira indica PCC 8005 OX=376219 GN= menF PE=4 SV=1
MLAVPPPQLLWQDRRELHRFLCECQQNCLVNSDPQIISIVREIDAVDPLRFLEAFLTEDKPHFYFEKAQSKQAIVGGDAAVKLTINNGERFAKSQEFIDAWFRRTIIAGSESNLAAPAFCCSFTFFQDNYQSNSEHYYLRNYPDVDNYHSRPVFPAATVFLPAILLYQKGDRYTLLINVLVDKKSDIEAVTASIWGKIDKVNGLQSGRIQSEITNKLHPQTIWINPQVGEFHHSVSENLRLISTGKLSKVVLSQAFDICSDTPFRLINSLANLRSLYPDCYIFSTGNSQGKNFIGASPERLITVNQGNCSTDALAGSAPRGETQAEDTEIAHRLLSSDKNLREHQAVVDFIIERLLHLGLTPERSPKPRLMQLSNIQHLWTPITSPISADIHLLDILAKLHPTPAAAGTPCEVAIAQIRQYETFDRSLYAAPLGWVDYHGNGEFIVGIRSALIDSDRARLFAGAGIVAGSEPEQELAEIQLKLQALLRGLV

SEQ ID NO: 94167 - protein, 489 aa, Limnothrix sp.
  misc_feature (1)..(489): tr|A0A372DUE2|A0A372DUE2_9CYAN Isochorismate synthase O S=Limnothrix sp. CACIAM 69d OX=1890733 GN=BJG00_000705 PE=4 SV=1
MLSALGQQTDLLSPTRLYCILEAARDEFLRSFRSQIVRLTFEIPALDPLEVFAEFSQADCLSFYFEKPDRRSAIAAFDRTVSLAVAGSDRFTKTKAFARKIHGLLRASDRAYGRAEGDRPASTRSIPSLLCAFPFLDEPRDLGSPFGEALIFLPRWQVVRRTTAQGPITTFTANAWVDGCTDLDQLCGELWQPLDRLLQWRSSSTSLSARTARYQSSGWELAAPDDPAFLAAARSALKDIADRQFCKVVLARAIDWQAPEPLDPALLLHNLRHRHPGCYTFAVGNDRGQTFLGASPECLVAIDHGRIATEALAGSAPRGTTPELDRIWGNRLLNNPKELHEHRLVADFIADRLAQLGAHPKVAVKPGLRKLSNIQHLQTPICGRLPRNVDPLDVVAALHPTPAVAGLSRSAAIAAIDRYEPFERSLYTGAIGWLDPMGNAEFAVGIRSALIQGDRARLFAGAGIVAGSDPERELAEIQLKLQALWAALI

SEQ ID NO: 94168 - protein, 463 aa, Listeria fleischmannii
  misc_feature (1)..(463): tr|H7F7P0|H7F7P0_9LIST Isochorismate synthase dhbC OS=L isteria fleischmannii subsp. coloradonensis OX=1081736 GN=dhbC PE=4 SV=1
MGITLPLALFEQAKRHATKDKPALLSWVHECPEDLAPHLLYQKAKDAFSGERFFWQNPEMTLTLAGFGVTEQYLAADKAKDAFSGLEDKINALKLRTVTNATEKGTGPLYFGGFKFDPERETDKEWQAFKDGLFYLPLFLVTKKGKEVFLTVNLVVYPDDEVKKLEAVRGQWEKIIDAKRPEMEVDALITAKELETDEFLENARDIIALLKDSEDLHKVVLSRRMGLRFSKQIDSGAVLQKMMDTQENSYFFVMEKGAALFFGATPERLVAVSEDKIHSSCVAGSAKRGRTKEEDEQLGNALLKDAKNLREHHYVVEMIEETLQQFADDLTISSEPVLLKNRDIQHLYMNVHAKKRNDVNILQIARALHPTPALGGSPKDLARAIIRMKETSDRGFYGGPIGFIDTDFDGEFAVAIRSGLVIDALGVLYAGCGIVSDSVPEEELQETKVKFQPMLRVLGGNVE

SEQ ID NO: 94169 - protein, 474 aa, Listeria grayi
  misc_feature (1)..(474): tr|D7V0I9|D7V0I9_LISGR Isochorismate synthase OS=Lister ia grayi DSM 20601 OX=525367 GN=menF PE=4 SV=1
MEDVNVKGELKNMSVKDALELFEQAKQVAATKQNTLLSWVTELPADTNVINVFEKAASSFRGERFFWQDPEQGFTYVGLGVTNRYTAEEEDSFQGLKERMAELKKHLVTNKVEVGTGPLFMGGFRFDKEKAVAKEWHSFRKATFYLPLYLLSEVGGKVYLTVNTFVFPDDSTKKWAAMKEQWERIISSDVPKLQAPELTLAKELDKDYFLQSTQEVIDLINQSEKVNKVVMSRRMSLKFGKQVDNNYVLEKMLETQENSYFFIMENGNTSFFGASPERLIAINDDTLMSSCVAGSTPRGKTPEEDEKLGSVLLQDGKNVKEHHYVVDYMQEKLAPFTNDLTLATDPILLKNRDIQHLYIRIEAEKKAEAELLDILQTIHPTPALGGTPQKMAMQIIRLKEELDRGFYGAPIGWIDFDGNGDFAVAIRSGLITDANGYLYAGCGIVADSVPEEELQETAVKFQPMLRIMGGLKND

SEQ ID NO: 94170 - protein, 462 aa, Listeria innocua
  misc_feature (1)..(462): tr|A0A476UXN8|A0A476UXN8_LISIO Isochorismate synthase O S=Listeria innocua OX=1642 GN=E1I03_13700 PE=4 SV=1
MNTKLPLDLFNQAKRSASQDQPALFSWVTELDELVSPVKLFKKAGTAFKGERFFWQNPEMTLTMTGFGVTKQFLAEKKKDAFLGLQEKIEKRLRTCVTNATVDATGPIYFGGFAFDPERDTEKEWQSFKDGLFYLPLFMLTNKDGKSYLTVNLSIYSDDTESKLEAVFNQWQKIIHQEVNEAEMALLTDFKEIGKEHFLETASEIIDMINHSEDVKKVVLARRMGLRFQRQVDSAIILENMLATQENSYFFLIEKGTGVFFGATPERLLAVNGDTIQSSCVAGSTERGATNDADEALGNALLQDAKNLREHSYVVQMMEETLKPFTTGLSLSSQPVLLKNRDIQHLYMNITAKKKPDVTMLEMVKALHPTPALGGLPQKMGLAIIRMKEEMDRGFYGAPIGWVDLKGSGEFAVAIRSGLIIDSQGLIYAGCGIVGDSVPKEELKETEVKFQPMLRVLGGIKK

SEQ ID NO: 94171 - protein, 462 aa, Listeria monocytogenes
  misc_feature (1)..(462): tr|A0A3A2XRG2|A0A3A2XRG2_LISMN Isochorismate synthase O S=Listeria monocytogenes OX=1639 GN=B4Y57_00120 PE=4 SV =1
MNTKLPLDLFNQAKRSASQDQPALFSWVTELDELVSPVKLFKKAGTAFKGERFFWQNPEMTLTMTGFGVTKQFLAEKKKDAFLGLQEKIEKRLRTSVTNATVDATGPVYFGGFAFDPERDTEKEWQSFKDGLFYLPLFMLTNKDGKSYLTVNLSIYSDDTESKLEAVFNQWQKIIHQEVNEAEMALLTDFKEIGKEHFLETASEIIDMINHSEDVKKVVLARRMGLRFQRQVDSAIILENMLATQENSYFFLIEKGTGVFFGATPERLLAVNGDEIHSSCVAGSTERGATEEADEALGNALLKDAKNLREHSYVVQMMEETLKPFTTGLSLSSQPVLLKNRDIQHLYMNITAKKKPDVSMLEMVKALHPTPALGGLPQKMGLAIIRMKEEMDRGFYGAPIGWVDLKGSGEFAVAIRSGLIVDSQGLIYAGCGIVGDSVPKEELQETAVKFQPMLRVLGGIKK

SEQ ID NO: 94172 - protein, 462 aa, Listeria seeligeri
  misc_feature (1)..(462): tr|A0A5B8AB61|A0A5B8AB61_LISSE Isochorismate synthase O S=Listeria seeligeri OX=1640 GN=EOT00_08865 PE=4 SV=1
MNTKLPLDLFNQAKRSASQDEPALFSWVTELDELVSPVKLFKKAGTAFKGERFFWQNPEMTLTMTGFGVTKQFLAEKKKDAFLGLQEKIDERLRTSVTNATVDATGPLYFGGFAFDPERDTEKEWQSFKDGLFYLPLFMLTNKDGKSYLTVNLSIYSDDTESKLDAVFNQWQKIIHQEVNEAEMALLTDSKELGKEHFMETASEIIDMINHSEDVKKVVLARRMGLRFQRQVDSAIILENMLATQENSYFFLIEKGTGVFFGASPERLLAVNEDTIYSSCVAGSTERGATPEEDEALGNALLGDAKNLREHSYVVQMMEETLKPFTTGLSLSSQPVLLKNRDIQHLYMNITAQKNPDVTMLEMVKALHPTPALGGFPQKMGIAIIRMKEEMDRGLYGAPIGWVDMKGQGEFAVAIRSGLIVDSQGLLFAGCGIVGDSVPKDELKETEVKFQPMLRVLGGIKK

SEQ ID NO: 94173 - protein, 464 aa, Listeria sp.
  misc_feature (1)..(464): tr|A0A3N9TT61|A0A3N9TT61_9LIST Isochorismate synthase O S=Listeria sp. SHR_NRA_18 OX=2269046 GN=DUK53_00150 PE= 4 SV=1
MGLTLPIELFQQAKRRLNSQQENVLLSWVCELPGGMAKRVFDQGNEFFKGERFFWQNKERTLRLAGLGAMDQLRVEQGHDRFLALHTRKEQVLERTVTNSEETACGAVYFGGFSFDDQHDASPEWEKFGEGFFYLPLFLVTEKEDRCYLSVNLWLSEDDDYAKVEAVMAQWDKVAASSVVQDTEVACILEERLAEDAWLRAATDVVALLQESPNMQKVVLARRMRLGFDGFLSSSRMIAHMEEQQANSYCFVLENGTSTFFGATPERLLMADSSHLESACVAGSIARGETASEDAMLGDALLSDAKNLAEHHFVVEMIQGTMARFCEDVQVSASPVLLKNRDIQHLYMTVSGRRGEAKLLDVLRALHPTPALGGWPQAEAMTVIRLKEEMDRGFYGAPIGWIDPLDRGEFAVAIRSALAIDTNALLYAGCGIVADSVPVEELAETAIKFQPMLRVLGGKVHERS

SEQ ID NO: 94174 - protein, 367 aa, Litoreibacter sp.
  misc_feature (1)..(367): tr|A0A5B8J9S2|A0A5B8J9S2_9RHOB Isochorismate synthase O S=Litoreibacter sp. LN3S51 OX=2599296 GN=FPZ52_14845 PE =4 SV=1
MTHHDQDFAQRRAGAAAPPPFEFRVKGRRLVSTDTQPVDLATVNGLKTGEIIAGALPFEDSHPARLWRGMVQEKPDITSPMLPDYRWILRTEPEGTDYIRAVQQAVGQMQASNLQKVVLARTLLARADRNIDLPALLTRLAADENATAFLVQLSAQTWLVGATPELLVETSGRTIRSFPLAGSLPRQADAQADRTAEKSLQASVKDLHEHRFVVEHIMDTLAPHCTDLRAPDGTATTSTRTMWHLGTRIAGVLKADGPSSLELAQLLHPTPAVCGVPRAAAMDVIRRSEPVRRDYYAGCVGWCDGRGDGAWHVSIRCAEVSGRDARLYAGAGIVAQSDPQSELVETRAKFGALLAALGCEITVHKDI

SEQ ID NO: 94175 - protein, 470 aa, Litorilinea aerophila
  misc_feature (1)..(470): tr|A0A540VHD3|A0A540VHD3_9CHLR Isochorismate synthase O S=Litorilinea aerophila OX=1204385 GN=FKZ61_08405 PE=4 SV=1
MTPHPPRPPQADLPSPGVEYRPDFQGRLISACCPAEGIDIYTFLRHGEQQPRFYWRDGSQDIQFAGVGVALSLMGWGEGRFHQIQRQARSLFTQALAMDEGPSLAAPRLFGGFAFRQDFVPDFTWAAFHPAHFILPHYQLVTCRGESWLTINALLAPGESARARQQALQEALAARYRLLRSLPKVIPAPPSAPQVEVDYPLSYPAWAAMIEEALRHFAAGRMDKVVLARICQVRSPTHLDIDAALFHLDQRYPGCYTFLVEPRPHHAFFGAPPELLVAVQGSRLQTMGLAGSAPRGATPQEDEALAAELLASAKDRHEHALVVQAIQERLAPLTTALTAPATPEIMRLSNIQHLFTPIQAELRRPDGVLPLVELLHPTPALGGWPRDAALAFIQEHEQTPRGWYAAPVGWIDRNLDGAFSVAIRSAVVQRRRAWLYAGAGIVAASRPEREWEETGWKFRPVLEALGVWRG

SEQ ID NO: 94176 - protein, 427 aa, Lonepinella koalarum
  misc_feature (1)..(427): tr|A0A5D1ZNF4|A0A5D1ZNF4_9PAST Isochorismate synthase M enF OS=Lonepinella koalarum OX=53417 GN=menF PE=3 SV=1
MENLCSGLIKQIQAHKLSALSAITYFKSEMQLTVELLAWLKAQEMYPQFYLNYRDEPITIASLGKVRLFSDEKMAQQFVQQQDLPLVGGLTFSKQAKFWLPRLLLENVDNILHVTIYFDNEQDFVTEQYACLQAAKTLEKFTALQSVKQVVHKIGQKANTEVWTNWIEQGLAEIKQGHLSKVVLANQTEFLSNQPIDAKDFLAESEQQNTGCYHFLLAEQAECAFVGSTPERLYTRQGQHMQTEALAGTATITDNPQYNQQQTDWLLNDRKNDHENRLVVQGICENLQPYVSHIAVCDVEVKQLRQVQHLRRCIQAELKNNVADGVCLQTIHPSAAVSGLPQQSAVQFLQKTENFDRSWYAGTLGIMRKLQAEFCVAIRSAFIEQQGEQSKIRIFAGAGIVAGSVPLLEWQEIERKASSLLSLLTIE

SEQ ID NO: 94177 - protein, 471 aa, Longibacter salinarum
  misc_feature (1)..(471): tr|A0A2A8D2Y1|A0A2A8D2Y1_9BACT Isochorismate synthase M enF OS=Longibacter salinarum OX=1850348 GN=menF PE=3 SV =1
MNTSDSLAVSRVRQIDAADAVRSSLVRQVRAAIQGVNGHRTVRRVLVDVEQRVDTADFLRSQAFETSVYWAGRGTDRSVAAVGAAEVLSGKSGAVDTDVLEDAIVARAQSLPDGARYYGGMRFDAFQATNNDYPDRGWESFGTYRFVLPRFELIQSGSEQHIVCNIVGPSDVKHIDEVVADVNRLLLPAKRQRSPGFPSPTGRTDVPARENWMSIIQGVLESISAGAVEKVVMARSATLSHDVDVDPYAVLQQLAPATPNCFHFSFDFGGDSTFVGASPERLFRQTNCTVYSEAVAGTRSRAQTTREDRALRDDLMTSDKDRREHAFVEDAIREMLAPLCTTLDSPNQRTEMKLSGGRHIWTRIEGTLNDDVSPVALLAALHPTPAVGGVPSERALETIREREGFDRGWYAGPVGWIGKDEAEFAVAIRSARIRGAQMALYSGAGIVRGSDPQEEWDEIEQKIGNFLSLVD

SEQ ID NO: 94178 - protein, 468 aa, Longimonas halophila
  misc_feature (1)..(468): tr|A0A2H3NX96|A0A2H3NX96_9BACT Isochorismate synthase M enF OS=Longimonas halophila OX=1469170 GN=menF PE=3 SV= 1
MIPLSLVSAPSDDRIDADAVRQALRAKVRQAVQSMNGVKQVRAVSVKVPVAIDPLAWGAVQTQAPFVYWRSRTTDSTYAVVGAARQWQGEAGSGETVPASVVERLAPWLDRLPPAVRLWGGARFDPTSEREAAWADFGAWTFMLPRFTLHRSGSTTRLHATLVAPHDTAAHEALLRQIDALRFPNIPDAHTDAHRIRRTDRPTRAEWMRQVRAAVQSIRSTDLRKVVLARAVDLHFDHALMPWALLHRLQQETPQCTAFGWQPKRSGPAFIGATPERLFRMHGDTLRTEAIAGTRPRGATPADDAMLRHELLTSDKDRREHAFVQDAIADALAPLATDVNMPDAPSELALQRKRHLRSEITATLHESTSPLNVLNALHPTPAVGGTPTRTARAFIREHESFDRGWYAGPVGWMTQDAAEMLVAIRSALVDRDTLTLYSGAGIVEGSDPASEWDEIENKLADFKAALER

SEQ ID NO: 94179 - protein, 441 aa, Lonsdalea britannica
  misc_feature (1)..(441): tr|A0A1X3RN89|A0A1X3RN89_9GAMM Isochorismate synthase M enF OS=Lonsdalea britannica OX=1082704 GN=menF PE=3 SV= 1
MEQLSGLLQRMERALGASLPDNAGFRTFTLSAESGDAAALLAWLAAQALYPQFYWQHRREPEEAAACGAVCTFASVSEAEAFLQREDIDDDVQLWGLNAFGYPTLAQAEPLDGYLFLPRVTLRRQGERVQLRVNIFSKISLRQDAEIALSALRQLSAAHPLPPLSATVRLTAHHPEKAQWTDLVQQALTEIEGGALEKVVLARMTRLTLDHPLPAATLMSASRTANHHCYHFMLAFTSESAFLGSSPERLYRREGKRLETEALAGTVANDRDDRRADELAKWLMQDAKNQNENQLVVDDIRQRLSQAATALDVLPMETIRLRKVQHLRRAIRAELYDAKDRACLQLLQPTAAVAGLPRAAARDYLACYEPFDRGWYAGSAGYLSRQQSEFCVSLRSADVERDRLTLYAGAGIVAGSDPQQEWQELENKAAGLKSLLDSDMS

SEQ ID NO: 94180 - protein, 441 aa, Lonsdalea iberica
  misc_feature (1)..(441): tr|A0A1X3RVZ7|A0A1X3RVZ7_9GAMM Isochorismate synthase M enF OS=Lonsdalea iberica OX=1082703 GN=menF PE=3 SV=1
MKQLSGLLQRMERALGAPLPDKAGFRTFTLSAERREDAELTAWLAAQTLYPQFYWQHRRDPEEAAACGAVCTFASASEAEAFLQREDLDDDVRLWGLNAFGYPTLAQAEPLDGYLFLPRITLLRQSERIVLRVNLFSAVSLRQDADNALKALRQLSMAHPLPPLAATVKLTAHHPEKQPWTDLIAQALAEIEAGALQKVVLARTTRLTLDRPLAAAALMAASRAINHDCYHFMLVFTPQRAFLGSSPERLYRREGNRLETEALAGTVANDLDDRRADELAQWLMQDAKNQNENQLVVDDIRQRLSQAATALEVMPLETIRLRKVQHLRRSIRAELHEAKDRACLQLLQPTAAVAGLPRAAARDYLACYEPFDRGWYAGSAGYLSRQISEFCVSLRSADVEGDRLTLYAGAGIVAGSDPQQEWQELDTKAAGLKSLLDSDMS

SEQ ID NO: 94181 - protein, 395 aa, Lonsdalea populi
  misc_feature (1)..(395): tr|A0A3N0US47|A0A3N0US47_9GAMM Isochorismate synthase O S=Lonsdalea populi OX=1172565 GN=EC392_04125 PE=4 SV=1
MSTLSAKTCASDIGDLRRDDMLFLSPTASLHARGCYATLTHPADDGDDLNGVFQRQVRHLFEQAQRDGLDNPLLVGAVPFDKRQPVNLKIPTSYRWIQRDELAERPATNTFPRILRQRQIPDRETFMRMVSAGIDATKRGELNKIVLSRLLDIETEQPLDTLSLLLQLNQQNPWSYNFHLPLADGCLVGASPELLLRKQGMTIASQPLAGSSRRSNDAGEDHRLQQALQSSVKDRYEHQLVIEEMQRALLPRCRSLTVPQAPTLISTPVLWHLATHLQADVIDPRENALSMACLLHPTPALCGTPFQPALDRIGELEPFDRQRFGGIVGWCDAQGNGEWAVTIRCGEVQDNRVRLFAGAGIVPDSQPLSEWQETGVKLSTMLRAFGLQQDREHAA

SEQ ID NO: 94182 - protein, 441 aa, Lonsdalea quercina
  misc_feature (1)..(441): tr|A0A1H3W4M9|A0A1H3W4M9_9GAMM Isochorismate synthase M enF OS=Lonsdalea quercina OX=71657 GN=menF PE=3 SV=1
MKQLSGLLQRMEQALGASLPDDAGFRTFTLSAERGGDTALTAWLAAQTLYPQFYWQHRRDPEEAAACGAVCTFASASEAEAFLHREDLDDDVRLWGLNAFGYPTLAQAEPLDGYLFLPRITLLRESERVVLRVNLFSAVSLRQDAENALKALRQLATAHPLPPLAATVRLTAHHPEKKQWTDLIAQTLTEIEAGALKKVVLARTTRLTLDRPLAAVPLMAASRAANHDCYHFMLAFTPERAFLGSSPERLYRREGNRLETEALAGTVVNDLDDRRADELAQWLMRDVKNQNENQLVVDDIRQRLSQAATALEVLPLEIIRLRKVQHLRRAIRAELFEAKDRACLQLLQPTAAVAGLPRAAARDYLACYEPFDRGWYAGSAGYLSRQVSEFCVSLRSADVEGDCLTLYAGAGIVAGSDPQQEWQELETKASGLKSLLDGDKS

SEQ ID NO: 94183 - protein, 403 aa, Lunatimonas lonarensis
  misc_feature (1)..(403): tr|R7ZQP3|R7ZQP3_9BACT Isochorismate synthase / Menaqui none-specific isochorismate synthase OS=Lunatimonas lon arensis OX=1232681 GN=ADIS_2885 PE=4 SV=1
MSTVAAKKTVSVVEFLEAIFLSALEGDVQFAVWRKPGTSKIEVVLDSNGNATQVIPHLEQLPSGFILHPFADTKSAYFIPAETYFSFDLEADTAYELPENLVSGFDEHSFTSGETIRQLLKKRISSETGDTKEPTAKEAFLAMVEEAKQEILVGKLFKVVTARTKHCPLPTRFDLVQTFLALCAAYPNSFVNFFRIPGIGTWLGATPELLIRTKGKLFHTMALAGTQRAVGDNPVKNTAWTQKEIEEQALVSRYIVSCFKKIRLREYDEIGPKTSMAGNLLHLKSDFFVDMKATGFPELGTVMLDLLHPTSAVCGMPKETAHQFIETHEGFERGFFAGYLGPVNIGGETSIFVNLRCGQLRGDQVILYAGAGITEDSEPEKEWEETEMKCDIIRRFLLKPELS

SEQ ID NO: 94184 - protein, 395 aa, Luteimonas sp.
  misc_feature (1)..(395): tr|A0A4Z1R3L2|A0A4Z1R3L2_9GAMM Isochorismate synthase O S=Luteimonas sp. 1626 OX=2508325 GN=E4582_01030 PE=4 SV =1
MSEGPLSIATDLPASAPWCGPASPGAFRLHTPSERLDAVGCLARLPSGPTDTLGARVDAFFAARRSGPPLLVGALPFDPHADDALYQPERVGAAAPGSRDDGACLRPSAAVAEPSEADYAAAVSRCVARLDTADAPHGLHKVVLARSLRVEAAAPVDPQRLAARLGEDASVTTYVMPLPVAAGEAPAWLVGATPELLVSRRGTAVVSHPLAGSARRWREPARDAAAARALLASGKDHEEHHHVVEAILDTLAPLCSRLHAPVAPSLHATRTMWHLGTRIEGTLKDPRVSSAHLAGLLHPTPAVCGTPRLPALEAIRALEPVDRGFYAGAVGWSDADGDGEWHVSIRCARVQGRVLRLFAGAGIVAGSEPALEVDETAGKFRAMLDALGIDDLRTA

SEQ ID NO: 94185 - protein, 388 aa, Luteimonas terrae
  misc_feature (1)..(388): tr|A0A4V3AP01|A0A4V3AP01_9GAMM Isochorismate synthase O S=Luteimonas terrae OX=1530191 GN=E2F49_06320 PE=4 SV=1
MSAAPLLEPRDRTGDVASLFRLHAPDRRLATDGIHARLPAGPAATLGQRVATFFSTPRSGPDLLVGALPFDPHADDALYQPARVSAPGTGTLPASLGTLVAAAELPSAGAYADAVARCVAALQAAPNGADALRKVVLARGLRIEGSAPIDPHVLAVKLGSDASVTTYVVPLPVKADEAPAWLVGATPELLVSRRGRTVVSHPLAGSARRTGDAAEDRRRTDALLASGKDLHEHRLVVEAILDGLAPLCSRLQAPPRPSLQATATMLHLATRIIGTLKDPDVSSATLAGVLHPTPAVCGTPRLPALQAIRDLEPFDRGFYAGAVGWTDASGDGDWYVAIRCARVQGNAMHLFAGAGIVADSQPALEVDETAAKFMALRNAIGIDDVRAV

SEQ ID NO: 94186 - protein, 382 aa, Luteococcus japonicus
  misc_feature (1)..(382): tr|A0A1R4KG59|A0A1R4KG59_9ACTN Isochorismate synthase o f siderophore biosynthesis OS=Luteococcus japonicus LSP _Lj1 OX=1255658 GN=FM114_14150 PE=4 SV=1
MFSVLSFTRPGERTLVPGFHLRTPFSVVETPGPVPELFEVSSPRTLSETASQHGHAVVGALSFDCSRAALAAAPDLSVTHGSPGLRVVREEPWPRLVGDAVLHPTPEGYREGVRQVLRAIAEERVVKTVLGRTVQYRFDAPVPAESLTRALARRHPEARTYCCPLPGGDSLVGASPELLVSRHGTTVRSHPLAGSVPRSANPAQDEAAARQLLASTKDLREHAVVVEMIADTLAPYCTRLTVPNQPALVSTRTVWHLGTWLRGELRDPQTSSLELAAALQPTPALCGAPHQPALDLLRGVEGFDREWFGGAVGWNDEHGDGEWTVAIRCARLSGTTATLFAGAGLVAGSDPSAELAETSAKFAALQDVLLGCAGQEHQERIA

SEQ ID NO: 94187 - protein, 352 aa, Lutibacter sp.
  misc_feature (1)..(352): tr|A0A4Q1IAI2|A0A4Q1IAI2_9FLAO Isochorismate synthase O S=Lutibacter sp. HS1-25 OX=2485000 GN=EC396_16690 PE=4 SV=1
MHFFNKISEVLKSDLPFVVYRKPNEKLVSVLVQSTNKLFYLDTFATNGFVFAPFNKDEEKILFPLTACEQFSLNITDFNELQISEEKTIVENVLDVQDSKLQHLNLVQKTIDFIQQKEADKIVVSRKERLKSSNFNLLNSYKKMLNNYPNAMVYLWFHPKVGCWLGASPERLIHCNKQHFKTMALAGTQAYVDTVEVDWKHKEKEEQQFVTDYILNTINGVVNHIKYTKPYTVKAGNLLHLRTDIYGDLQSENGLEQLIERLHPTPAICGVPKKIANHFIAENEGYNRSFYAGYLGEINLNCETNLYVNLRCMQIVNSEISIYIGGGITAESNAEKEWDETVFKTEVMKKIL

SEQ ID NO: 94188 - protein, 435 aa, Lyngbya aestuarii
  misc_feature (1)..(435): tr|U7QFP9|U7QFP9_9CYAN Salicylate synthase OS=Lyngbya a estuarii BL J OX=1348334 GN=M595_4772 PE=4 SV=1
MLTYQERFIPGQRDSLILLQNLLESGLFFDYMMYHQQQEVRIAANALAVISVSLEELSIQSLDQLQFQPIHDPFKQVESAFANLQIENWTAYGYISFDMARFYYPYTKAINQPLLYFFVPETELRITSEGVYIKSLNHLSKLQAICELETASKSYSPTTIPELHFTEKQQYIQKVEQLIQAIQARELQKAIICRSIKFSGELDLLGTYTLGYQRNHSARSYCFQLGEVQGVGFSPEILMEIHADHWIVTNPLAGTRPRGKNLEEDQQLQRELFTDAKEVKEHALSILLVQQEMSGICVENTVKISDFMQVKQYPYVQHLSSHVVGQLQADKTPWDALKALFPAITVSGIEKSQAIAWIDRLEDTPRGIYAGAIGWLNGEGQADFAIPIRSAYQYGNSIHLNAGAGIMGESIPQREYIECGNKMNTILTNLVLKSD

SEQ ID NO: 94189 - protein, 461 aa, Lysinibacillus composti
  misc_feature (1)..(461): tr|A0A3N9UL68|A0A3N9UL68_9BACI Isochorismate synthase O S=Lysinibacillus composti OX=720633 GN=EBB45_03460 PE=4 SV=1
MHQKWFKATEVESSSFNSKASFYIETIEVSRLSALAFFAAGESKYKGQRFFWQNREKTLTIVGLGHAYVLENNKGLNRFNHIEEEWKKLTKNIVKEEREAQPILFGGFTFDPENEHKGEWEGFPEAFFAVATFQLTIQHDKAYVSIHLITDQDNSASIFDSLRQERDYLIHAAQVRELKTYEKPLPTNYHELYKDEYLDSIQKVTGHIKSKEAEKVVIARSLSMEFDDMVTSPQILSHVIHEQPESYLFGLERENLLFFGASPERLVKVVHGQAYSSCVAGSIKRGKTAEEDHALGQILLNDAKNLGEHQYVVEMIVNTFAKNCLEYKVPKHPKLLKIRDIQHLFTPVEGKLSPNATILQLVKSLHPTPALGGVPRQEALAIIRQYEPMNRGLYAAPIGWIDAEGNGEFAVAIRSAALIDHKAYLYAGGGIVADSEPISEYEETLVKFRPMLRALGGEINE

SEQ ID NO: 94190 - protein, 461 aa, Lysinibacillus endophyticus
  misc_feature (1)..(461): tr|A0A494ZAY2|A0A494ZAY2_9BACI Isochorismate synthase O S=Lysinibacillus endophyticus OX=1978490 GN=D8M03_00010 PE=4 SV=1
MHQKWLQSTEVEVGNINRAQTFYIETIEVSRLSALAFFAAGEQKYKGKRFFWQNREKTLTLVGLGHAYVIKNNAGDNRFDQIEEEWRELTKNIIKEESEPQPILFGGFTFDPENTKTGEWDGFPQSLFAVATYQLVIRNDKAYISIHLVTDKANSLQEFDAMRVERDHLIHAAQVKELKTYEKPVMTKYMELKKQDYLQSIEKVTSLIKDKKAEKVVIARSLEMDFAETLSSPQVLSHVINEQPESYLFGLEQYELLFFGASPERLVKVKNGYAYSSCVAGSIKRGKTADEDKQLGDNLLNDSKNLGEHRYVVEMIADTFEKNCTEFKVPKHPKLLKIRDIQHLYTPVEGKLKPNATILQLVKDLHPTPALGGVPREGALSIIRKYETMNRGLYAAPIGWLDAEGNGEFAVAIRSAALIKDKAYLYAGGGIVADSEPVSEYEETLVKFRPMIRALGGQLSE

SEQ ID NO: 94191 - protein, 461 aa, Lysinibacillus halotolerans
  misc_feature (1)..(461): tr|A0A3M8H128|A0A3M8H128_9BACI Isochorismate synthase O S=Lysinibacillus halotolerans OX=1368476 GN=EC501_17535 PE=4 SV=1
MHQKWLQTTEVEVGTVNSTLTFYIETIEVNRLSALAFFAAGEKQYKGQRFFWQNREKTFTLVGLGHAYKIENNANDERFDFIEKEWKALTKNIVKEESEQQPILFGGFTFDPNNMKEGEWNGFPQSYFAIATYQLVIRDDKAYVSIHLVTKNENCIEEFDLLRKERDQLIHAAQVKELKMYDKPVMTNYREVYKEDYLKTIATVTNLIKNNEAEKVVIARTLEMQFDDILTAPQVLSHVISEQPESYLFGLERDKLLFFGASPERLVKVEKGNAFSSCVAGSIKRGKTVEEDNALGESLLADSKNLGEHRYVVDMIAHTFEQNCIQYKVPKQPKLLKIRDIQHLYTPVEGVLKQDATILQLVKHLHPTPALGGVPRQEALSIIRQYESMNRGLYAAPLGWMDAEGNGEFIVAIRSAALKENTAFLYAGGGIVADSEPISEYEETLVKFRPMLRALGGQLHE

SEQ ID NO: 94192 - protein, 461 aa, Lysinibacillus mangiferihumi
  misc_feature (1)..(461): tr|A0A4U2Z0C5|A0A4U2Z0C5_9BACI Isochorismate synthase O S=Lysinibacillus mangiferihumi OX=1130819 GN=FC756_1380 0 PE=4 SV=1
MQQKWYQATELEVDSLGQNLHFYMETIEVSRLSALAFFAAGEERYKGERFYWQNREKTMTLVGLGHAHTIQNNEKNNRFDAVEAEWKRLTKNCVKGQAELQPILFGGFTFDPQNNVDGEWTDFPEAYFALATYQLVLRDDKAYVSIHLIASAAEADGQLEALRKERNHLIHAAQVKEVKMYAKPEITNYFEPYKDPYLASIDQVTALIKAKKADKVVIARSLALQFKEQVTSPQVLAQIIHEQPESYLFGLEWQDLLFFGASPERLVKVENGRAYSSCVAGSIQRGKTAEEDEAYGQSLLNDPKNGGEHQYVVDMIAETFRKNCVEMKIPDGPRLLKIRDIQHLFTPVEGQLNNEATILQLTKHLHPTPALGGVPRKEAMIAIRKYEPMNRGLYAAPIGWLDAEGNGEFAVAIRSAALLKDKAYLYAGGGIVADSEPQSEYEETLVKFRPMLRALGGQVHE

SEQ ID NO: 94193 - protein, 461 aa, Lysinibacillus sp.
  misc_feature (1)..(461): tr|A0A432LHP3|A0A432LHP3_9BACI Isochorismate synthase O S=Lysinibacillus sp. SYSU K30002 OX=2498145 GN=EK386_02 730 PE=4 SV=1
MHQKWFHTTEVEVGTVNRAQTFYIETIEVSRLSALAFFAAGENKYKGKRFFWQNREKTLTLVGLGHAYIIENNEDNERFDLIEDEWKALTKNIVKEASELQPILFGGFSFDPKNDKKGEWEGFPQSHFAVATYQLVLRNDKAYVSIHLVTENEHSLEEFDRLRTERDHLIHAAQVRELKNYEKPVMTKYDEVNKDKYLQSIDTVTSLIKDNWAQKVVIARSLEMQFAQSVSSPQVLSQVMNEQPESYLFGLERDNLLFFGASPERLVKVENGYGYSSCVAGSIKRGKTAEEDKQLGDSLLQDQKNLGEHRYVVEMIAETFAKNCTQFKVPKHPKLLKIRDIQHLYTPVEGKLSKDATILQLVKHLHPTPALGGVPRMKALAMIRQYESMNRGLYAAPIGWVDSEGNGEFAVAIRSAALVDNCAYLYAGGGIVADSEPNSEYEETLVKFRPMLRALGGQLNE

SEQ ID NO: 94194 - protein, 461 aa, Lysinibacillus sphaericus
  misc_feature (1)..(461): tr|A0A2S5CWL5|A0A2S5CWL5_LYSSH Salicylate biosynthesis isochorismate synthase OS=Lysinibacillus sphaericus OX= 1421 GN=pchA PE=4 SV=1
MQQKWYQATEVEVDSLGQNLHFYMETIEVSRLSALAFYAAGEECYKGERFYWQNREKTMTLVGLGHAHTIQNNEKNNRFDAVEAEWKRLTKNCVKGQVELQPILFGGFTFDPQNNVDGEWTDFPEAYFALATYQLVLRDDKAYISIHLIANAAEADGQLEALRKERNHLIHAAQVKEVKMYAKPEITNYFEPYKDPYLASIDQVTALIKAKKADKVVIARSLALQFKEQVTSPQVLAQIIHEQPESYLFGLEWQDLLFFGASPERLVKVENGRAYSSCVAGSIQRGKTAEEDEAYGQSLLNDPKNGGEHQYVVDMIAETFRKNCVEMKIPDGPRLLKIRDIQHLFTPVEGQLNNEATILQLTKHLHPTPALGGVPRKEAMTAIRKYEPMNRGLYAAPIGWLDAEGNGEFAVAIRSAALLKDKAYLYAGGGIVADSEPQSEYEETLVKFRPMLRALGGQVHE

SEQ ID NO: 94195 - protein, 461 aa, Lysinibacillus tabacifolii
  misc_feature (1)..(461): tr|A0A4U2XRW7|A0A4U2XRW7_9BACI Isochorismate synthase O S=Lysinibacillus tabacifolii OX=1173107 GN=FC748_00040 PE=4 SV=1
MQQKWYQATELEVDSLGQNLHFYMETIEVSRLSALAFFAAGEERYKGERFYWQNREKTMTLVGLGHAHTIQNNEKNNRFDAVEAEWKRLTKNCVKGQAELQPILFGGFTFDPQNNVDGEWTDFPEAYFALATYQFVLRDDKAYVSIHLIASATEADGQLEALRKERNHLIHAAQVKEVKMYAKPEITNYFEPYKDPYLASIDQVTALIKAKKADKVVIARSLALQFKEQVTSPQVLAQIIHEQPESYLFGLEWQDLLFFGASPERLVKVENGRAYSSCVAGSIQRGKTAEEDEAYGQSLLNDPKNGGEHQYVVDMIAETFRKNCVEMKIPDGPRLLKIRDIQHLFTPVEGQLNNEATILQLTKHLHPTPALGGVPRKEAMIAIRKYEPMNRGLYAAPIGWLDAEGNGEFAVAIRSAALLKDKAYLYAGGGIVADSEPQSEYEETLVKFRPMLRALGGQVHE

SEQ ID NO: 94196 - protein, 461 aa, Lysinibacillus telephonicus
  misc_feature (1)..(461): tr|A0A431USK1|A0A431USK1_9BACI Isochorismate synthase O S=Lysinibacillus telephonicus OX=1714840 GN=EKG35_09100 PE=4 SV=1
MHQKWLQTTEVEVGTVNSKLSFYIETIEVNRLSALAFFAAGEKQYKGQRFFWQNREKTFTLVGLGHAYVIENNANNNRFDLVEEEWKELTKNIVKEESEPQPILFGGFTFDPENDKKDVWGDFPQSFFAVATFQLVIRNDNAYVSIHLVTDKEDSLEEFEALRQERDHLIHAAQVREVKMYEKPAMANYLELYKEDYLNSINEVTSLIKQNKAEKVVIARALEMAFSDTLTSPQVLSHVINEQPESYLFGLERDDLLFFGASPERLVKVEDGNAFSSCVAGSIKRGKTAEEDKMLGQSLLNDAKNLGEHRYVVEMIAETFAKNCLDYKVPKNPKLLKIRDIQHLYTPVEGKLTPDATILQLVKHLHPTPALGGVPRKEALAVIRRYESMNRGLYAAPLGWIDAEGNGEFAVAIRSAAQINNKAFLYAGGGIVADSEPTSEYEETLVKFRPMLRALGGQLNE

SEQ ID NO: 94197 - protein, 380 aa, Lysinimonas sp.
  misc_feature (1)..(380): tr|A0A387BCU4|A0A387BCU4_9MICO Isochorismate synthase O S=Lysinimonas sp. 2DFWR-13 OX=2419774 GN=D7I47_07450 PE =4 SV=1
MRRGEGVAGLGEALRLSFTGPDRIARAAETWRRIAAAARVDDPVRTSGSGLIAFGAFTFADDSAFENVLIVPRTIIGRRDGVSWVTEVSVDGDETPAPELAATPLGSEFRLSLQPGAVSPERYLELVADAVSRIRSGGLRKVVLARDLVGHLPEGGDLRRVLVDLALGYPDTWTFAIDGHIGSSPETLVRVNHGKVTARVLAGSIARGADAEADHAAALRLATSTKDLDEHRYAVQSVLDALGPHARSGISASEIPFALKLPNLWHLATNIEGALSDGSSALDLAAALHPTAAVAGTPTAKALEVIRELEPLDRGRYGGPVGWVDAAGDGKWAVSLRSAEIDATGGIRAFAGGGILAASEPEVELAETKLKFRPIVEAFG

SEQ ID NO: 94198 - protein, 414 aa, Lysobacter antibioticus
  misc_feature (1)..(414): tr|A0A0S2FB60|A0A0S2FB60_9GAMM Isochorismate synthase d hbC OS=Lysobacter antibioticus OX=84531 GN=dhbC PE=4 SV =1
MIGETHALTAVESPSHGVRSPATPALLSSYLAHDSLFSSASHQLHARGVLETLVHSIDTDLAGESERLLARVANDSGRLPLMGAVPFSASQASCLWVPSQAAFAAGRARHRGAALSSLPSDQKAAPRVESVPAPAQFKRNVERSLDRIHDGGISKVVMSRSLRIAARVDVPQLLAQLLTRAPGAYTFAMDLAGAAGPKACLIGSSPELLLSKRGARVVSNPLAGSIPRVADAEEDQRRARGLLESAKDRYEHALVVDAVAAALRPYCRDLRVPKTPSLVATPTMWHLSSVVDGELIDPNTSSLRLALALHPTPAVCGYPTEPARGVIHELEGYDRGLFTGLVGWCDAEGDGEWAVTIRCAMVEEDSATVFAGAGIVAGSEPDAELAETTAKLGTMLNAMGLTQAVEASGAEGRA

SEQ ID NO: 94199 - protein, 421 aa, Lysobacter capsici
  misc_feature (1)..(421): tr|A0A108U5D6|A0A108U5D6_9GAMM Isochorismate synthase o f siderophore biosynthesis OS=Lysobacter capsici AZ78 O X=1444315 GN=AZ78_0408 PE=4 SV=1
MIGEAYSLHGVEDLTPAPAPALSAVASTTGAALLSNYQPRDSLFSSSSTQLHARGVLQSLTRSIDDDLAGASQRLLAYVAAETGRLPMLGAVPFASDEPSRMWLPSQAVFAAGRARHRGAALSALNAEQRPMPRVEPVPAPAQFMRNVERSLDRIVEGGISKVVMSRSLRIAARVDVPQLLAQLLARAPGAYTFAMDLAGAGGPQACLIGSSPELLLSKRGARIVSNPLAGSIPRHPDPQEDQRRAQGLLQSAKDLHEHALVIGSVAAALRPYCRELQVPATPSLIATPTMWHLSTRVDGVLIDPSTSSLRLALALHPTPAVCGYPTERAREVIREFEGYERGLFTGLVGWCDNEGDGEWAVTIRCAVVEEECATVYAGAGIVAGSQPRDELAETTAKLGTMLGAMGLTHAAEAGGAQGRA

SEQ ID NO: 94200 - protein, 315 aa, Lysobacter enzymogenes
  misc_feature (1)..(315): tr|A0A5B7R2X5|A0A5B7R2X5_LYSEN Isochorismate synthase O S=Lysobacter enzymogenes OX=69 GN=FE772_13160 PE=4 SV=1
MGAGAGRSRPGARHRGAVHGEARHADRIEPNVQPVPAPAQFKRNVERSLQRIHDGGLRKVVMSRSLRIDARVEVAQLLAQLLARAPSAYTFAMDLAGAGGPAACLIGSSPELLLSKRGARIVSNPLAGSIPRSADPHEDRRRAEGLLQSAKDLHEHALVIEDVAAALRPFCRELQVPAAPSLLATPTMWHLSTRVDGVLRDPTTSSLRLALALHPTPAVCGYPTEPARRTIRELEGYDRGLFTGLVGWCDSEGDGEWAVTIRCALVEEHRATVFAGAGIVAGSQPEAELAETTAKLRTMLGAMGLAHVAEAEGRA

SEQ ID NO: 94201 - protein, 451 aa, Lysobacter gummosus
  misc_feature (1)..(451): tr|A0A0S2GCX1|A0A0S2GCX1_9GAMM Salicylate synthase OS=L ysobacter gummosus OX=262324 GN=LG3211_4750 PE=4 SV=1
MTQSLKGEGAAMSADRVMRVIGLSGGDGLQIAERLLHALGHDQYFAYERDDRWHIGLGITATLSISPCGGRYEVISKEGMQTGPTNAALASVARQFMAEHSCSGRRVHGLVAFNYAPCVNGQPYTPGTWPLLILMIPRVEIVVTSDIVEICSDDEAAVDEVVRVVSEQTTVSSPHLCPIDTKAGERVYQDIVRAALEEIGSGVYAKIIVSRAVPTQERIDMPASLVLGRRRNTPARTFALKFDSREAVGFSPELVMSVDDGIVSTEPLAGTRSRSDDPRTDARNRDELINDPKEIVEHAISVREAVDELMRICTHGTVVIDDFMSVRNRGSVQHLGSRVSGRLKDNADAWDALDILFPSITATGIPKQAAIAAIARLETVPRELYSGAVLMIEGERRFEAALVLRAAYQDAARSWVQAGAGIIAQSNPLREFTETVEKLGSVAPYLAMEPR

SEQ ID NO: 94202 - protein, 418 aa, Lysobacter maris
  misc_feature (1)..(418): tr|A0A508B773|A0A508B773_9GAMM Isochorismate synthase O S=Lysobacter maris OX=1605891 GN=FKV24_00535 PE=4 SV=1
MDASSSAATAFADAPAIPHPSSPRISPRPPRDALLDAWRPGDGLFSSPRQQLHCRGVQARLRSAANDGLADAADALLAGCGRDGSDRLPLIGAIPFDRHAPARLWLPQQAVFASGHARHRGSRRPSDRGGDAHALPPARSVPSASDYLAAVAQALARIERGELDKVVMSRCLRLRTRVDVDALLSALLARDPAGYTFAVDAGDDTRAGQLVGTSPELLLRKHGARVTSNPLAGSAPRSVDPDEDAHRAQALLASAKDRHEHALVVDAVATALAPWCRNLEVPATPSLLATPTMWHLSTRIDGTLADASTHALRLALQLHPTPAVCGHPTAAARTAIGELEGYDRDLFTGLVGWCDAHGDGEWAVTIRCALVEAEAATLYAGAGVVAGSTPEAELAETSAKLGTMLAAMGLPPLTEGQP

SEQ ID NO: 94203 - protein, 388 aa, Lysobacter sp.
  misc_feature (1)..(388): tr|A0A3M8SZU0|A0A3M8SZU0_9GAMM Isochorismate synthase O S=Lysobacter sp. ZS60 OX=1327343 GN=EER27_08455 PE=4 SV =1
MPNDPLLSAYRARDSLFSSPTSQLHARGVLREVSTAADQGLVDAAALALRQAACDAGRLPLLGAVPFDASEPSRLWIPMQAAFANGGARHRGAGAGHASTAPSTIHVQPYPEPARYLRNVASSLERILDGGLSKVVMSRSVRISAQIDVPQLLQRLLARTSDGYTFAMDLAGAGGPRACLVGSSPELLLSRRGTRVVSNPLAGSIARSEDPIEDQRRARRLLRSAKDRHEHAVVVDAVGAALTPFCRQLKVPAAPSLLATPTMWHLSSRVQGELRDTSTSSLQLALALHPTPAVCGHPTASARQLIREIEGYERGLFTGLVGWCDGDGDGEWAVTIRCALIDDDSATVYAGAGVVEGSRPDAELAETTAKLATMLGAMGLGTALAGRA

SEQ ID NO: 94204 - protein, 434 aa, Macrococcus bohemicus
  misc_feature (1)..(434): tr|A0A4R5XV22|A0A4R5XV22_9STAP Isochorismate synthase O S=Macrococcus bohemicus OX=1903056 GN=EVU91_11205 PE=4 SV=1
MPINQQFESHLTTNKINKIEQFDLGFQLNVAWIMDYFHAFAGERYVFINKDKSFKLIGIGHHSVVTADTIHPILIERQFKAIVQDATYIGNGSQYDLKLFGGFQFDNNESKNFSAYEKSHFIIPKIQIVESNGHASIIFVDQSLDKAQLIEALRHHTGDNVPYNKIISAEDIDLDLFKSNAHKAISMMQEEKLEKVVLSRKRKITMERDIDILPLIDQAMKNHEVSYFALMESGTQTFITKTPEQLVAVQDGILHTNAIAGTMGKSIANAKQKLLYDEKNLYEHKIVVESIKEDLAPFTNEITLKQSPDILENQFFYHLYTPINAKLNRGGLLEVTESLHPTPALGGFPKRAAMHFLAEANEGRGLYGAPLGYVDLNDEGEFIVAIRSMVIQDNTAMLYAGCGIVKSSAVESEVYETEIKFKPMLEMLGVNEDE

SEQ ID NO: 94205 - protein, 410 aa, Macrococcus bovicus
  misc_feature (1)..(410): tr|A0A4R6C151|A0A4R6C151_9STAP Isochorismate synthase O S=Macrococcus bovicus OX=69968 GN=ERX55_05500 PE=4 SV=1
MSTGNIQIKEQAGAYESPAELFKAAARYKGERYFYMNKDKSEWLIGLGHAYIIKDESRNPELITEQFQALLDQAEQPHHIRLFGGFQFDAGDSSLFDAFGHSHFIWPKIQIRCQHNQLTYTYTDMTDEEILNWRSDDEIKAPVVQSVANLNEGQFLHNVATAVEAMKAGQFDKVVLSRQKKVVMDAPVDSAWLIERGLQNEEYSYFLLLEEQESTFVSRTPEQLVKVEDHQLSTNAIAGTMAREIDQAAQKLMNDAKNRVEHDIVVRSITADIEPFTSRMNLPDAPEIMTNRFVYHLYTPITAQLEKGNVLSISHALHPTPALGGFPKEAAATFIEQAEGDRGFYGAPMGYVTADGEGEFVVAIRSMLIKENIAVLFAGCGVVEDSVPEAEFDETETKFKPMLQLLGVTE

SEQ ID NO: 94206 - protein, 410 aa, Macrococcus brunensis
  misc_feature (1)..(410): tr|A0A4R6BFR1|A0A4R6BFR1_9STAP Isochorismate synthase O S=Macrococcus brunensis OX=198483 GN=ERX27_02655 PE=4 S V=1
MSKGNIQITEQTGAYESPAELFKAAARYKGERYFYMNKDKSEWLIGLGHAYMIKEKSRSPERITEQFQTLLEQTKEPHHIRLFGGFQFDAGNSPLFDEFGHSHFIWPKIQILCQNNQLTYSYTDMTEEEILNWRSVSEVKAPVIQSVSNQNEEQFLRNVATAVEAMKADQFDKVVLSRQKKVVMNESVDSAWLIERGLKNDEYSYFLLMEGQNSIFVSRTPEQLVKVKADQLSTNAIAGTMARGFNHAAQKLLRDAKNLVEHDIVVKSITADIEPFTTCMNVPDSPKIMTNQFVYHLYTPITAKIEKGNVLNISQALHPTPALGGFPKQAAAAFIEQAEGDRGFYGAPMGYVTAEFEGEFIVAIRSMLIKENTAVLFAGCGVVADSIPESELDETETKFKPMLQLLGVTE

SEQ ID NO: 94207 - protein, 424 aa, Macrococcus canis
  misc_feature (1)..(424): tr|A0A1W7AD78|A0A1W7AD78_9STAP Salicylate biosynthesis isochorismate synthase OS=Macrococcus canis OX=1855823 GN=pchA PE=4 SV=1
MPVDLTLKAIYQFPYEGVTQEAAIFRHFADYKGERYLYINKDKSLKIIGIGVQSLIAHSTIDPEGVEAAFHNQLADAQVHGDRKLHLKLFGGFYFDEAESTDFDTFSRSHFVIPKIQIIIEEGASWIIFTDAALDRERICSELMSLPSVDVQHNALIHSEDIELETFKTNATEAIQQMQQGAFDKVVLSRKRQLTMTSPIEVEALIDVASRNHELSYTMVMESGHKTFISKTPEQLVAVMDGVIYTNAIAGTMPKTVTDAKALLQSDEKNLHEHHIVVQSIEQDLAPFSQNIIMKDDPEILENQFLYHLYTPIKAKLNNGSTLRVTRALHPTPALGGYPKSEAMAFLESSGEHRGLYGAPVGYVDAQGDGEFIVAIRSMVIEENRALLFAGCGIVEDSEVESEVYETEIKFKPMLQMLGVPQHE

SEQ ID NO: 94208 - protein, 410 aa, Macrococcus carouselicus
  misc_feature (1)..(410): tr|A0A4R6BRR7|A0A4R6BRR7_9STAP Isochorismate synthase O S=Macrococcus carouselicus OX=69969 GN=ERX40_05555 PE=4 SV=1
MSKEKIQVIERAGLPESPAELFGAAARYKGERYFYMNKDRSEWLMGLGHAFVIKEKRRSPGRITEQYQALLERVEGPHSVRLFGGFQFDDGDSALFSDFGHSHFVWPKIQVICRGHELTYTYTDMTEEEIIDWRQSAETAAPNITAIDNLDEEKFLSNVRTAVAAMNNHLFDKVVLSRQKKVTAENEIDSAWLLQNGLKNHENSYLVLIEQNDKIFVSRTPEQLVKVENQVLSTNAIAGTMSRSVVHAEEKLLGDAKNLGEHAIVVRSIEADIDDFTSEVKMPASPQIMVNNFFYHLYTPIEARISEGDILAVSHALHPTPALGGFPKEKAARFIKEVEGDRGFYGAPIGYITPDFDGEFIVAIRSMLIHRETAVLFAGCGVVKDSVPESELFETEIKFKPMLQLLGVTQ

SEQ ID NO: 94209 - protein, 434 aa, Macrococcus caseolyticus
  misc_feature (1)..(434): tr|A0A3B0F1H9|A0A3B0F1H9_9STAP Isochorismate synthase O S=Macrococcus caseolyticus OX=69966 GN=D6861_09120 PE=4 SV=1
MISFRKKCFFVPVNLTLKAIYQYPYEGVTHEAAIFRHFAEYKGERYLYINKEKSLKIIGIGVQSLIARSTIDPVGVEAAFHKQTADAQLHGDSKLHLKLFGGFYFDEAESPHFDTFSKSHFIIPKIQIIIEEAASWIIFTDPALDRERICSDLMSLPSVDIQHNALVDSEDVELDKFRLNATEAIQKMQQSAFDKVVLSRKRQLTMTSPIEVETLIDAASRNHELSYTMVMESGSKTFISKTPEQLVAVKDGVIYTNAIAGTMPKTVSDAKDLLQSDEKNLHEHRIVVQSIEQDLAPFSQNIIMKDYPEILENQFLYHLYTPIKAKLNNGSTLRVTRALHPTPALGGYPKIEAMAFLEKAGEHRGLYGAPVGYVDAQGDGEFIVAIRSMVIEDNRAILFAGCGIVEDSEVESEVYETEIKFKPMLQMLGVPHHE

SEQ ID NO: 94210 - protein, 434 aa, Macrococcus goetzii
  misc_feature (1)..(434): tr|A0A4R6C9E5|A0A4R6C9E5_9STAP Isochorismate synthase O S=Macrococcus goetzii OX=1891097 GN=ETI08_11880 PE=4 SV =1
MPINQQFEMHLTTNKIKKIEQFDLDFQLNVAWIMDYFHAFAGERYVFINKDKSFKLIGIGHHSVLTADTIHPVLIERQFKAIVQDAAYIGNDSQYELKLFGGFQFDNNESKNFSAYEKSHFIIPKIQIVESNGHASIIFVDQSLDKMQLIDALRHHAAEKVQDNKIISAEDIDLDLFKSNAHKAISMMQQDKLEKVVLSRKRKITMARDIDILPLIEQAMKNHEVSYFALIESGAQTFITKTPEQLVAVQDGILHTNAIAGTMGKSIDNAKQKLLDDEKNLYEHKIVVESIKEDLAPFTNEITLKLSPDILENQFFYHLYTPINAKLNRGGLLEVTESLHPTPALGGFPKRAAMHFLAEANEGRGLYGAPLGYVDLNDEGEFIVAIRSMVIQYNTAMLFAGCGIVKSSIVESEVYETEIKFKPMLEMLGVNEDE

SEQ ID NO: 94211 - protein, 410 aa, Macrococcus hajekii
  misc_feature (1)..(410): tr|A0A4R6BLE7|A0A4R6BLE7_9STAP Isochorismate synthase O S=Macrococcus hajekii OX=198482 GN=ERX37_00475 PE=4 SV= 1
MSKEKIQVIERIGAAASPDQLFNMTADFKGARYFYMNKDRSEWLIGLGHAYIIKEESRSPEKISEAYQALLARVDGDHHVRLFGGFQFDDGTSELFEGFGHSHFIWPKIQILYRNNELLFSYTDMTEEEIDGWYHEHHADRPVIQTISNLDEEKFLNNVRMAVEAMDNQLFDKVVLSRQKKIVAENQIDSSWLIENGLKNLENSYLVLLEEGNKLFVSRTPEQLVKVENNQLSTNAIAGTMSRSIADAEKKLLADGKNLFEHQIVVNSITADIQDFTTGLKIPETPGILANNFFYHLYTPIEAIIEEGDILSVSDALHPTPALGGYPKEEAARFIERVEGDRGFYGAPMGYITPDMDGEFVVAIRSMLVEGNTAVLFAGCGVVKDSIPESELYETEIKFKPMLQLLGVSQ

SEQ ID NO: 94212 - protein, 430 aa, Macrococcus lamae
  misc_feature (1)..(430): tr|A0A4R6BTL5|A0A4R6BTL5_9STAP Isochorismate synthase O S=Macrococcus lamae OX=198484 GN=ERX29_08620 PE=4 SV=1
MKEAESEMMEDYTSRRTIYQIQWDKEILPYQLFNLYQEYAGSRYFFMTKEKDEWLLGLGVEKLINVNHRSPSYVTQVFNKMLESCTVTGISPNLIRLFGGFQFDEGNNADFEGFGHSHFIWPKIQVLFKDKCYYLSFTNMETSAVEDFLSKLDRTIATAQLPQVVEHHNVNEELFLANVRRAVGDMSNGLLSKVVLSRRKKVLLASAIDNSTLIRRGFHDHEHSYFVLLEHGARTYVSRTPEQLVKVTGNHLATNAIAGTMSAKFADAKERLLRDHKNLKEHQIVVGSIEDDLKPYTSELTVPAAPDILSNRYFYHLYTPISGTIKNSDILTLTQAMHPTPALGGFPKAEAAEFIQQVEGNRGFYGAPIGYIDAQMDGEFVVAIRSMVLAGNEAVLYAGCGIVQDSRPEEELYETEIKFKPMLQLLGVSQ

SEQ ID NO: 94213 - protein, 431 aa, Macrococcus sp.
  misc_feature (1)..(431): tr|A0A4Q1AXN3|A0A4Q1AXN3_9STAP Isochorismate synthase O S=Macrococcus sp. DPC7161 OX=2507060 GN=ER639_11110 PE= 4 SV=1
MKEVYSVNDHSNVCEPSVHIYKINKILNIYQLYCHFNDKKSVLINKDKSFQWIGIGQYKAIQLDEINPAAVEKTFKGYFKHIDTDLKRHVKLFGGFHFDQLGSSYFKDFDLSHFYIPKVQIEIANGETIVTLIDGSQEELNQIVLAIENLDTLIGNLNITINTPEIASVVDLDLNQFKDNVLKATHLMTTSDLDKVVLSRKKRVQMTHIDPADILYRALTNDEFSYFAMIPSNDAIFITKTPEQLVKLEGQTYVTNAIAGTMDKNMPDAKNVLLNDEKNLMEHQLVTNSIVSDLKQVTEDIVYHHSPIIMENQFFYHLYTPISGKLQNASLLDLAKILHPTPALGGFPKYLSNAFLKEANEERGLYGAPLGYMDLCGDGEFIVSIRSMLIQGNEALMFGGCGIIKDSQVDLEVHETEIKFNPMFKMLGGKL

SEQ ID NO: 94214 - protein, 537 aa, Magnetospirillum sp.
  misc_feature (1)..(537): tr|A0A522VYJ9|A0A522VYJ9_9PROT Isochorismate synthase O S=Magnetospirillum sp. OX=31872 GN=EPN20_20210 PE=4 SV= 1
MAMSKASYTPNFRSKSQRLNCIISQDRNTLQSSSSPATWGHRITGKAHGGDDGRRYDGALGLTSIKAGHPFVGKTSATMAVIQQAAMMAITLAHTPDRPSDGDLFDALKAGIAAALPALAATGAGRLVSLSLTISADHLDTLEVPGAECLWLAPGLTLHASGKAIRIDGDLGRHFQKIRADWRVLGDGAARPIGFFTFPPPNSPDLPTLWVPQVVIRRDADTATVTFSMRHDGGTVAEMTRRWTAVLRSMLTAPATQRGGGGDICSITACPDARQWAGRVEATTRAIADGRFDKVVLARRFDILMARPPVVADLVRRLAAINPQCRSFALPYRRGSTVASTPEILAAKRGRLVVAHALAGTAKRHDSETDSQAAAARLLASPKERHEHEVVVATIAAQLRSLCETVQCPPRPEVMALRFVQHLWTPISGTLPPDLGLLDVVAQLHPTPAVLGAPREAAARWLDQVGERRDGLYSGVAGWIDADGDGDAAVVLRSAHIEGCGAVLWAGAGIVADSLPEAELAETEMKMATMLEVLRPL

SEQ ID NO: 94215 - protein, 428 aa, Mangrovibacter phragmitis
  misc_feature (1)..(428): tr|A0A1B7L9V8|A0A1B7L9V8_9ENTR Isochorismate synthase M enF OS=Mangrovibacter phragmitis OX=1691903 GN=menF PE= 3 SV=1
MELTQAVKALQRALCEELPDTPGVRILSVHLSLADSQDPLCWLNSQTCWPQFYWQHRDGHEEYAVLYALRTFTSLAEGQSFLSRFPEYPELRLWGLNAFNPQQGQLFLPRLTWQRQGTQTRLILNLYSESSLREAAQEAESWLSGLCPATAIPALAARVCEQVHLPEKDQWTGLVTEATQAIGRKRFDKVVLARATDMQLSRPMSPAWLMHASRQHNSHCYHFYMAFDSHKAFLGSSPERLWHRAGRQLSTEALAGTVGRDADDSKADQQSQWLLKDKKNQHENWLVVEDICQRLQAVAGQIDVEPVQVIRLRKVQHLHRAITATLNHADDTACLMQLQPTAAVAGLPRKDALAFIHAHEPFNRGWYAGSAGYLSLASAGFCVALRSALVQYDKVRLYAGAGIVAQSDPAEEWQEIENKVAALRSLFS

SEQ ID NO: 94216 - protein, 428 aa, Mangrovibacter plantisponsor
  misc_feature (1)..(428): tr|A0A317Q3P0|A0A317Q3P0_9ENTR Isochorismate synthase M enF OS=Mangrovibacter plantisponsor OX=451513 GN=menF P E=3 SV=1
MELTQAVKALQQALRKELPDTPGVRIMSVPLSLAGNQEPLCWLNSQACWPQFYWQHRDGHEEYAVLCALRTFTSLAEGQRFLSCFPEYPELRLWGLNAFDPQHGQLFLPRLTWQRQGSQARLVLNLYSETSLREAAAEAESWLSGLCPAAVIPELAARVCEQVHLPAEVQWLALVTEATQAISRGQFDKVVLARATDVQLTQPMSPAWLMHASRQHNSRCYHFYMAFDSRQAFLGSSPERLWHRAGRQLSTEALAGTVGRDADDSQADQQSQWLLKDKKNQHENWLVVEDICQRLQAVAGQIDVEPVQVIRLRKVQHLHRAITATLNYADDTACLMQLQPTAAVAGLPRKDALAFIYAHEPFNRGWYAGSAGYLSLATSEFCVALRSALVQYNNVRLYAGAGIVAQSNPAEEWLEIENKVAALRSLFS

SEQ ID NO: 94217 - protein, 428 aa, Mangrovibacter sp.
  misc_feature (1)..(428): tr|A0A071LML2|A0A071LML2_9ENTR Isochorismate synthase M enF OS=Mangrovibacter sp. MFB070 OX=1224318 GN=menF PE= 3 SV=1
MELTQAVKALQQALRKELPDTPGVRIMSVPLSLAGNQDPLCWLNSQACWPQFYWQHRDGHEEYAVLCALRTFTSLAEGQRFLSCFPEYPELRLWGLNAFDPQHGQLFLPRLTWQRQGSQARLVLNLYSETSLCEAAAEAELWLSGLCPAAAIPELAARVCEQVHLPAEAQWLALVAEATQAISRGQFGKVVLARATDVQLTQPMSPAWLMHASRQHNSRCYHFYMAFDSRQAFLGSSPERLWHRAGRQLSTEALAGTVGRDADDSQADQQSQWLLKDKKNQHENWLVVEDICQRLQAVAGQIDVEPVQVIRLRKVQHLHRAITATLNYADDTACLMQLQPTAAVAGLPRKDALAFIYAHEPFNRGWYAGSAGYLSLATSEFCVALRSALVQYNNVRLYAGAGIVAQSNPAEEWLEIENKVAALRSLFS

SEQ ID NO: 94218 - protein, 433 aa, Mannheimia granulomatis
  misc_feature (1)..(433): tr|A0A011P9V2|A0A011P9V2_9PAST Isochorismate synthase M enF OS=Mannheimia granulomatis OX=85402 GN=menF PE=3 SV =1
MPIFNQLKQELIKGYTEISHHQGLIAIQASVAYSEENFSLLGWLKAQENHYPHFFLQYRDSAQAIATIGILKQFNTLEAAQTFIEQQNLPLIGGMQFEGNTQFILPQFSLVKNQQNLTACFYFDSDHYQQQAVIFEQFLANFEQVSQLSLTNNTMLSINSASNFEQWKHNIDKAIAAIKEGFFRKVVLANATTLNFELPISCYDLLAESEKTNLGCYHFLWAESAENAFIGSTPERLYQRQGKYFFTEALAGTSAVMPSEIQTELNAQWLLSDPKNIHENQLVVDDIENNLKDCVDHFEVAEATIKRLNNVQHLRRTIQAELKGNMSDRDCLLRIHPTAAVAGLPRQNAIQFLTQNEPFTRHWYAGTLGVMSQRESEFCVTLRSALIARNTITLYAGAGIVEASDPQSEWQEIKRKSQGIAKLLNIDLVVSEI

SEQ ID NO: 94219 - protein, 431 aa, Mannheimia haemolytica
  misc_feature (1)..(431): tr|A0A3S4XWY8|A0A3S4XWY8_MANHA Isochorismate synthase M enF OS=Mannheimia haemolytica OX=75985 GN=menF PE=3 SV= 1
MLIFHQLKQELTKSYSKVGREQGLVAIQASMPLLEENIPLLGWLKTQKTSYPHFFLQYRDTDQTIATIGTLRQFHTLETAQSFIQQHHFPLIGGLQFEGNTQFILPQFSLVKNQQNLTACFYFDSDNFEQQAVIFEQFLANFPQITELGLTDNPLVSMSATSHFEQWKANIEKAIVSIEQGDFQKVVLANAMRLQFEQPICAYSLLAQSQKTNLGCYHFLWAESADVAFLGSTPERLYQRQGLRFSTEALAGTAAVTTSEVQTELNAQWLLSDPKNIYENQLVVDDIENQLKDCVTEFAVSEAKIKRLHNVQHLRRQIQATLKPDTLDVDCLNKIHPTAAVAGLPRQKAKGFITENEPFTRHWYAGTLGVMRNEEAEFCVTLRSALISQNSITLYAGAGIVAGSGPHSEWQEIRRKAQGMAKLLNIDLTAL

SEQ ID NO: 94220 - protein, 434 aa, Mannheimia sp.
  misc_feature (1)..(434): tr|W0Q2K9|W0Q2K9_9PAST Isochorismate synthase MenF OS=M annheimia sp. USDA-ARS-USMARC-1261 OX=1432056 GN=menF P E=3 SV=1
MSIFNQLKQELIKIYSKVGKGEGLISIQASVPLFEENLPLLGWLKAQNQHYPHFFLQYRDKDETIATIGAIRQFHTLETAQAFIQQYNLPLIGGLQFEGYTQFILPQFTLVKNQQNLTACFYFDSDNMEQQAVVFAQFLANFEHIEKLSLPDNPLQSVAAASSFEQWESNINKAICAIGQGEFQKVVLANAIRLHFENPICSYDLIAQSRQINQGCYHFLWAESAEVAFIGSTPERLYQRKDKQFFTEALAGTAAVTPSETQTELNAQWLLSDPKNIHENQLVVDDIESNLADCVTEFKVSEAKIKRLHNVQHLRRQIQATLKQGVFDSDCLSRIHPTAAVAGLPRPKAKQFITENEPFTRHWYAGTLGVMSNDEAEFCVTLRSALISQNSITLYAGAGIVEASDPQSEWQEIKRKSQGIAKLLNIDLVTKGDL

SEQ ID NO: 94221 - protein, 442 aa, Mannheimia succiniciproducens
  misc_feature (1)..(442): tr|Q65RK8|Q65RK8_MANSM Isochorismate synthase MenF OS=M annheimia succiniciproducens (strain MBEL55E) OX=221988 GN=menF PE=3 SV=1
MFLTMDSLQSLQQQLIQQMDAYQPCKNQPEITALTAKIQLEQNLLAWLKAQQDYPQFYLHCRADSPNEQENHIAAIGQVRTFTTVNHAQTFVRRADFTLVGGMTFNGECDFYLPRLLLRQVDGELTATLFIDSQKDLSVEKQLAGKCLKNFTKSVALEPVVQSVRLVEKKATQAQWCEWVEQALLEIKKGSFTKVVLANESIFSSRQPINAIDFLAESEKKNTGCYHFFFAQKADYAFIGSSPERLYLRNGQYLQTEALAGTAVMSDDEEQNQRQGEWLLKDEKNEYENMLVVEDICGNIESFTQNIEVQSVELKRLRLVQHLRRKIFAKLTALTADEACLNAIHPTAAVAGLPKQNALRFLAKTETFERSWYAGTLGFMNRARAEFCVTLRSAFVEQNRIRVFAGAGIVAGSVPLLEWQEIERKASGLLSLLQNSGEHICQ

SEQ ID NO: 94222 - protein, 434 aa, Mannheimia varigena
  misc_feature (1)..(434): tr|W0QC10|W0QC10_9PAST Isochorismate synthase MenF OS=M annheimia varigena USDA-ARS-USMARC-1296 OX=1433287 GN=m enF PE=3 SV=1
MSIFNLLKQELIKSYSNMGKGEGLVTIQASVSLFETDLSLLGWLKAQNQHYPHFFLQYRDKDETIATVGAIRQFHTLETAQAFIQQHNLPLIGGLQFEGYTQFILPQFSLVKNQQNLTACFYFDSDNMEQQAVVFAQFIANFEHIEELSLSDNPLQSVAATSSFEQWESNINKAICAIGQGKFQKVVLANAIRLHFEKPICSYDLIAQSRQINQGCYHFLWAESKEIAFIGSTPERLYHRKDKQLFTEALAGTAAVTPSETQTELNAQWLLSDPKNIHENQLVVDDIENNLADCVAEFDVSEAKIKRLHNVQHLRRQIQARLKQNITDSDCLNRIHPTAAVAGLPRPKAKQFITENEPFTRHWYAGTLGVMSNDEAEFCVTLRSALISQNSITLYAGAGIVEASDPQSEWQEIKRKSQGIAKLLNIDLVTKEDL

SEQ ID NO: 94223 - protein, 376 aa, Marinifilaceae bacterium
  misc_feature (1)..(376): tr|A0A434AY71|A0A434AY71_9BACT Isochorismate synthase O S=Marinifilaceae bacterium T3-2 S1-C OX=2487017 GN=DLK0 5_02185 PE=4 SV=1
MDSEAVYKEELVIFLSKCLSQNRPFYAFQLPESEEIKIGTQKETKLVSYQHLFELGGKAGFVFAPFHQDEKHLSWFIRSDIFLSEKDITKDSLQVLDALEYNSERRDLNSETHVSSQEEYFEQIKFMIADLQQKKLDKVILSRIQTIDDSGKTNAVDSFLKLSRVYPSAFVFFVVIPSAGTWIGASPETLLIADDSGVKTMALAGTQSLGDRKMEDIQWARKEIEEQAYVSKYIEQILSKHELNSFIRKGPETVRAANIVHLQTSYQLSVVPDFQKLAALVEDLHPTPAVCGLPILQAQKLIRKQENHDREYYAGYLGPIAANGSLSLFVNLRSMKVLKDKMALFVGGGITADSIPEKEWEETCLKAQTLLNVIRK

SEQ ID NO: 94224 - protein, 372 aa, Marinilabiliaceae bacterium
  misc_feature (1)..(372): tr|A0A4V2HX25|A0A4V2HX25_9BACT Isochorismate synthase O S=Marinilabiliaceae bacterium JC017 OX=2234116 GN=DMA11 _21850 PE=4 SV=1
MPDLNNDLNLLKPAMVFYREPDAVTTHFISGVYKKLHGGAALDGLLTEEGFVISPFDSRDAVTYVVAPDASGVWEDEMPAEARRLWECCVADGVLLEQEQATTRQQYMTAFERLQSFIQEGTLTKAILSRVHIEKEVALSGALALFQCLCANYPRAFVYLFHVPELGVWMGASPEILFTRKGDRCQTVSLAGTIADQEQAAEKWTAKELDEQAVVTNYIASALQELGIEAVDQQGPFTVQAGKVAHLKTLFEFSVDNFNGSVGALVQRLHPTPAVCGWPREQAFAVIRQLEQHNRLLYAGFIGPVGKNSVNLYVNIRCLRFVTDGVALYLGGGITAGSEVESEWQETEMKAQTLLEVIKNMRNLQAYDETYI

SEQ ID NO: 94225 - protein, 388 aa, Marinomonas mediterranea
  misc_feature (1)..(388): tr|F2JZU1|F2JZU1_MARM1 Isochorismate synthase OS=Marino monas mediterranea (strain ATCC 700492 / JCM 21426 / NB RC 103028 / MMB-1) OX=717774 GN=Marme_2830 PE=4 SV=1
MDTLVSGFFDSASVTTSMPFLFYSKSSSVRCRGAKSVLECPLTDPTFSRKLDDLFNREKAQGVDNPIVVGAIPFDLAQPCHLMVPQWFTFQSAPPFDMSQFNDTGFKHRVRAHQFVPNHDVFIQCVEQALTRFDDTDLKKVVLSRLLELELDKDVDLTRLMGNVMAQNPNAYHFNIPVKGGVMIGASPELLIRKKDERVYSNPLAGSAKRQDDQALDGAAADALWQSKKDQYEHRLVVDSIRSAISGYVSDLRIPEEPSLVNTPTMWHLSTQIEGCVKESATNTFDLIKAIHPTPAMGGTPTQHAKQAIDEIEPHDRHFFSGLVGWADSKGNGEWAIAIRCAEVNGAFVRLFAGAGVVPDSNPENEWIETGNKMRTMLNAFGIKRDAL

SEQ ID NO: 94226 - protein, 397 aa, Marinomonas posidonica
  misc_feature (1)..(397): tr|F6CU84|F6CU84_MARPP Isochorismate synthase OS=Marino monas posidonica (strain CECT 7376 / NCIMB 14433 / IVIA -Po-181) OX=491952 GN=Mar181_2165 PE=4 SV=1
MDVAFPDYDYDTELLLSSDQHKTDLFLFNSSQNLVRARGVSQKLVTPLSAATFRHDVQNVFDAEKVKGVDNPILVGAIPFDLDQPCQLFAPKWSERVKPFSANFPAFKDKDFSHHITHHAFTPDHNDFVAMIEEALITLRHDDLKKIVLSKTLEMSLDKSVDIPRLLTNIMGQNPNAYHFSVPLDTGILIGASPELLIRKEGNILFSNPLAGSAKRCKDPQEDKRVAQALNQSEKDQYEHRIVVDAIRSALIPMVESMKLEVQPSLISTPTMWHLSTEIEAMLAIDSSLSIFDVIKQLHPTPAMCGTPTGLAHDHIAALEPHQRDFFSGLVGWCDAQGNGEWAIAIRCAEVASNKVRLFAGAGVVPDSCAESEWRETSAKMQTMINAFGIKDFNNDD

SEQ ID NO: 94227 - protein, 355 aa, Marixanthomonas ophiurae
  misc_feature (1)..(355): tr|A0A3E1Q724|A0A3E1Q724_9FLAO Isochorismate synthase O S=Marixanthomonas ophiurae OX=387659 GN=DZ858_11865 PE= 4 SV=1
MNLKILLQKITEHYKNQKPFVLYSHPESDTVEVLLQKDSKKYTSEAFDKQGIVMAPFIYETKAVCIPLQESEHISCEFSKEKIKTKTLDPSFKTLEKEAYMRLVSKALATISHKNTHKVVVSRKKEYSISNTDFSIFVPRLLKLYPTAFRYVWFHPETGLWCGATPETLLVTNGTSFTTMALAGTKKIENQKTPEWTPKEKNEQKVVTDAISNCLQKVTSVLRVSKTYTHEAGSLAHLRTDITGMLKNKKTTLATITAALHPTPAVCGTPLSAALDFINKNEGYDREYYTGFIGSIDDNDSTSCLFVNLRCMKIEDNKASLYVGGGITFDSQPEEEWEETQNKLQTMLQVVQPML

SEQ ID NO: 94228 - protein, 427 aa, Marmoricola ginsengisoli
  misc_feature (1)..(427): tr|A0A3N0CFS0|A0A3N0CFS0_9ACTN Isochorismate synthase O S=Marmoricola ginsengisoli OX=661483 GN=EFK50_10965 PE= 4 SV=1
MTSTPSAATPTSLGRLVARSIEVADPGPLLDLLPEDAPTAWLRRGEGIVGWGVAASVRTSGPERFDAAVDWWHQVSASAVVRDELAVPGSGLICLGSFAFADDPGDSVLIVPKVVVGRRGDRTWVTVIGDDEVSPPPDLVAQPEPRAPGEVVFADGSVGGTAWEAVVAQAVQRINAGELEKVVLARDLIASTEAPLDVRWPLRRLGSEYEMCWTFHVDGLFGATPELLVRRERGLVTSRVLAGTIRRTGDDERDLALAATLARSSKDLEEHEYAVRSVADSLAPHCTSMNVPESPFVLHLPNVMHLATDVAGVVPDTDSSTVLELAAALHPSAAVGGTPTDVAVAMISEIEGMDRGRYAGPVGWMDASGDGEFGIALRSAEYGPGPNGTGRVRLFAGCGIVAESDPESELAEAQAKFVPVRDALAGR

SEQ ID NO: 94229 - protein, 430 aa, Marmoricola pocheonensis
  misc_feature (1)..(430): tr|A0A3N0GWI8|A0A3N0GWI8_9ACTN Isochorismate synthase O S=Marmoricola pocheonensis OX=661485 GN=EFL26_03850 PE= 4 SV=1
MTSTPRASTQAVAGRLVARTTEITDPGPLLELLPDAAEGAGEDPGLTAWLRRGEGIVGWGVAASIRTTGSGRFDDAVDWWREVAGAAVVRDDLRVPGSGLVCLASFAFADEPGESVLVVPRVVVGRRGDRCWITLIGDDELTPAPTLQRQPEPRAPGNVVFTDGDVDSAEWEAIVARAVERIGSGELEKVVLARDLVATTDEPLDVRWPLRRLGTSYEMCWTFHVDGLFGATPELLVRRERGLVTSRVLAGTIRRTGHDERDLALAATLARSSKDLEEHEYAVRSVAEALAPHCSSMNVPEAPFVLHLPNVMHLATDVAGVVPDTDGSTVLELAAALHPSAAVGGTPTKVAVEMIKEIEGMDRGRYAGPVGWMDAHGDGEFGIALRSAEYSGTRVRLFAGCGIVADSDPEAELAEAQAKFVPVRDALTAR

SEQ ID NO: 94230 - protein, 382 aa, Marmoricola solisilvae
  misc_feature (1)..(382): tr|A0A3N0E0U0|A0A3N0E0U0_9ACTN Isochorismate synthase O S=Marmoricola solisilvae OX=1542737 GN=EFL95_01985 PE=4 SV=1
MTWLRRGEGVITWGVAAECRTSGEARFSDASTWWRNVVRVAAVADEVEVPGSGLICLGSFAFADEPGDSVLVIPRVVVGRRGDRFWVTTIGSAAVETPRLETQDAPEPPVNLVFADGALSGAEWEGVVWEAVLHLNAGELDKVVLARDLIATADAPIDVRWPLRRLGSEYEMCWTFHVDGLFGATPELLVRREKGLVTSRVLAGTIRRTGDDEHDLTLAATLARSSKDLEEHEYAVRSVAEALEPYCTSMNVPETPFVLHLPNVMHLATDVAGVAHDSGASVLELAAALHPSAAVGGTPTKLAVEMIAEIEGMDRGRYAGPVGWMNAHGDGEFGIALRSAEIDGARVRLFAGCGIVAGSDPEAELAEAQAKFVPVRDSLAGA

SEQ ID NO: 94231 - protein, 411 aa, Marmoricola sp.
  misc_feature (1)..(411): tr|A0A3L8P5P7|A0A3L8P5P7_9ACTN Isochorismate synthase O S=Marmoricola sp. 4Q3S-7 OX=2478913 GN=D9V37_00505 PE=4 SV=1
MRLRARTVEIADPGALLELLPDSHTFAWLRRGEGLVGWGEAARLDTSGADRFLRASDWWRDLVEHADVEDDVAAPGSGLVAFGGFGFADEPGDSALVVPQVVVGRRRGMAWLTVVGDAAEPLPTPHLVGSPTSEIGDTVRFADGALSGAQWESVVADAVRRIQAGDLEKVVLARDLLAETRAPIDVRRPLRRLARGYPMCWTFHVDGWFGATPEMLVRRERGLVTSRVLAGTIRRTGDDAHDLTLAATLARSSKDLEEHEYAVRSVADALGPYCDSMNVPDAPFVLHLPNVMHLATDVTAVVHDSSGANALELAAALHPSAAVGGTPTKTAVRLISEIEGMDRGRYAGPVGWIDATGDGEFGIALRSAHLEGSTVRLFAGCGIVADSDPAAELAEATAKFVPVRDALAARD

SEQ ID NO: 94232 - protein, 402 aa, Massilia sp.
  misc_feature (1)..(402): tr|A0A430HG99|A0A430HG99_9BURK Isochorismate synthase O S=Massilia sp. SOD OX=2495579 GN=EJB06_23225 PE=4 SV=1
MNDRLHGHYLSRTSAADLCAHYEAGATLFSSPGHTLLASGKRSILAPQSGAALAGAASTLLRAARRDGEMLPVLIGAVPFLADAPAHLFIPEHVLMATGPANLPSPAPQAAATRARFPRTIAAVPDQAQYRRAVAQAVERIRAGRMEKVVLSRSLTLETEIDVASLLARLGARNAHGYTFAIDMAPEQDGRRTLIGASPELLLSRIGTRVRCHPLAGSIPRSADAQEDQRRAQGLLTSQKDLHEHALVADMVADSLRPFCHSVQVPAVPSLIATPTMWHLGSEVTAELNEPEMTSLALAMALHPTPAVCGHPAAVARSFINEAEGFDRGFFAGLVGWMDANGDGEWAVTLRCADVRAHSATLYAGAGIVAGSDPELEYLETSGKLRTMLRAMGLEAVLEDAA

SEQ ID NO: 94233 - protein, 471 aa, Mastigocladus laminosus
  misc_feature (1)..(471): tr|A0A4D9CLB3|A0A4D9CLB3_MASLA Isochorismate synthase O S=Mastigocladus laminosus UU774 OX=1594576 GN=BLD44_010 905 PE=4 SV=1
MTVSPCAADFFVYNRELYQFLFAVQRKSIKNNSTQVASIALQINLVDPLVVLDKLAQPHQLNFYWENQGKKEAIAAIDAVAKLQIEGKERFTKSEAFIKYCLKNIINFGDTERYFSKPLFFCSFSFFDRNQQESYPFPAATIFLPRWQIAVKDECCILVANFVIHPEINIERILQNLWRKIETIHSSTFYSLHQDFQEPKFSKKSVANPEKFKRSVLSALETIQSTHISKIVLADALDVRSNTTFNLFNSLHNLRQLHPNCYVFSTSNGKGQNFVGASPERLISIHNQQLITDALAGSAARGETPAEDANNADRLLNSEKERHEHSLVIDFITQRLSQLGLLPQILPPRLRQLSNIQHLWTPISAIVPDEVHPLKIVSQLHPTPAVAGTAPDAACAEIRRYESFERGLYAAPLGWVDADGNCEFVVGIRSALIDGDRARLYAGAGIVAGSDPEKELAEIQLKLQALLKALV

SEQ ID NO: 94234 - protein, 146 aa, Medicago truncatula
  misc_feature (1)..(146): tr|Q2HT71|Q2HT71_MEDTR Anthranilate synthase component I and chorismate binding protein OS=Medicago truncatula OX=3880 GN=MtrDRAFT_AC150777g10v1 PE=4 SV=1
MVRKLLRIQHLFAQLTGRLRSEEDEFEILSSLHPSPAVCGFPTEEAQLLIAETEVFDRGMYAGPVGWFGGGESDFAVGIRSALVEQELGALIYAGTGIDEGSNPYLEWDELELKTSKECLSVNAYIHRKRLLASLLFYFISDSVAK

SEQ ID NO: 94235 - protein, 458 aa, Melghiribacillus thermohalophilus
  misc_feature (1)..(458): tr|A0A4V2V0R0|A0A4V2V0R0_9BACI Isochorismate synthase M enF OS=Melghiribacillus thermohalophilus OX=1324956 GN= menF PE=3 SV=1
MVEIEEQLSGLIQKLKRDQRNFMLLSYTEKILFQDPIAFFENGKALFEKRFFWSSADQDFSVVGLGSVARLTGSQDRFMNVEEKWHEILTTIFIENPYTIPGTGPVIMGGFSFHEQEQLDGIWADFEHNEMVLPQIILTNYRGNSYITHQIPIRVEQTAEKIMEQINEHRLHTLKPRSEMRQAECILKQDLNPDAWKDLVKFATDEIKKGSFSKVVLARELRATYDQNVSPASVLMNLVEEQHHSYIYAFESNGTCFVGASPERLVKVEDNCLLSTCLAGTAPRGGTVSEDEKIGQELLKDRKNLQEHAYVVDMIRQAVESCCDEVDIPDGPVLLPLKNLQHLYTPVRGKLKEGKTLLHVVKQLHPTPALGGEPRNEALHFIRQYERLNRGWYAGPVGWMDASGNGEFAVAIRSALLNGNQASLFAGCGIVRDSDPEEEFKETEIKLTPMLSALGGWK

SEQ ID NO: 94236 - protein, 469 aa, Melghirimyces algeriensis
  misc_feature (1)..(469): tr|A0A521F173|A0A521F173_9BACL Isochorismate synthase M enF OS=Melghirimyces algeriensis OX=910412 GN=menF PE=3 SV=1
MSIIKQLNHLAGIQEGVVRSRRKGHSVLVSQTQRIPHLDPLLFFEAGVREGETRNFWADPDRELILVGLGTAWKIELGPEANNRYREVEKRWRLLLRDAVQIPEDGPRGTGPLLMGGFSFDPLQKRTPLWKGFPEAAFTLPRFLLTVYRGTCLLTVNVVVKPGDQAETLAEMLAEEEEKRLGWMQGVSSSMVSLSYHAYEVEPDRWKQSVSQVAQEIQAGKMDKLVLAREIRLESEDAFASSKILNQLWKRQPSSFLFAVEREGACFLGASPERLVKRDGDRLVSTCIAGTTRRGRDWEEDWTFGQELLSDPKNRVEHQVVVEMIREAFQQGCSHVRVPEEPTLYQVRDVQHLFTPVEGRAKLGTTLLSMVEQLHPTPALGGYPREVAMTRIRELEVMDRGWYAAPLGWVDFRGDGEFACGIRSGLIRGQTASLFAGCGIVGDSDPNSEYEETRMKFRPMLSAIGGESR

SEQ ID NO: 94237 - protein, 472 aa, Melghirimyces profundicolus
  misc_feature (1)..(472): tr|A0A2T6C4X1|A0A2T6C4X1_9BACL Isochorismate synthase M enF OS=Melghirimyces profundicolus OX=1242148 GN=menF P E=3 SV=1
MGGTTVSTMKQLDNLSGLKEGAARARRENRPVLVSRTAGIPSLDPLSFFASGARWGARNFWSDPDRELTLVGVGAAWRAEAVPMEDRYRAVEREWEELLANAVREPADPPRGAGPLLLGGFSFDPLRTETPLWEGFSEASFILPRFMLSVRKERCLLTVNARVEPGDDPEEMAEALAEEEEELIRTAATLSVAPSPSSYDAFEVEPERWKESVSEAARHIREENLEKVVLARELRLRSEEPFAAAVILKRLQQRQPGSFLFAMERSDACFLGASPERLVKKDDDRLYSTCLAGTAARGATPEEDRKRGEELLADPKNREEHAVVVHMIAEAFREGCGEVRVPDTPTLYRVRDVQHLFTPVEGRSKPDTTLLAMVRRLHPTPAMGGYPQQAALDRIRETEGMDRGWYAAPLGWLDFRGDGEFICGIRSGLLRGRTASLFAGCGIVGDSDPDSEYEETRMKFRPMLSALGGEGR

SEQ ID NO: 94238 - protein, 507 aa, Melghirimyces thermohalophilus
  misc_feature (1)..(507): tr|A0A1G6LCC3|A0A1G6LCC3_9BACL Isochorismate synthase M enF OS=Melghirimyces thermohalophilus OX=1236220 GN=men F PE=3 SV=1
MCLEKQSLIIDRIDLGAVGSPIGRGCVAPGVERMGGTTVSTMKQLDNLSGLEEGAKRACRSNRPVLVSRTRRAPNLDPLSFFASGAGTQGARNFWSDPGREETLVGLGTAWRTESGPQSKNRYEKVERDWAELIRGALREPADVPRGAGPLLMGGFSFDPIGEHTSLWEGFSDASFILPRFLLTAVRDGVWLTVNAVITPEDDPEEMSQRLAEEEDQLVDAAVQGYIPETHPSYDAVEVEPERWRQAVAQAAREIREGQLEKVVLARELRLHSQETIRPASVLKRLQEQQPHSFLFAVERGDACFVGASPERLVKKEKHHLYSTCLAGTYPRGSDPAADQELGSQLLRDVKNRQEHAVVVNMIVEALREGCTSIQVPEEPVLYKVRDVQHLFTPVEGTAHPDTTLLSIVERLHPTPALGGYPQERALSRIREMEAMDRGWYAAPLGWLDFRGDGEFACGIRSGLLRNKSASLFAGCGIMGDSDPVSEYEETRMKFQPMLLALGGKKR

SEQ ID NO: 94239 - protein, 458 aa, Melissococcus sp.
  misc_feature (1)..(458): tr|A0A374JJ59|A0A374JJ59_9ENTE Isochorismate synthase O S=Melissococcus sp. OM08-11BH OX=2293110 GN=DXC12_01705 PE=4 SV=1
MFNIPNDVRKLEINKPTLVSWVVNLSDILEAVVPYFYQAKKVFTTRYFWQTPDASFSIVGLGTCKEYVAQDYRDMAISREKLLKNTITNAKHSGTGPVFLGGFPFDKTVDSQKTWQELGDGYLFIPKIMVTQTNDNRFLTFNMIVESSNDLNTQWENIVSLWNTVSQSRQSESPTRQQIQANEIHVPEWLETVELAIDEITSDSDIRKIVLARELFIEATEVFSVNDVLKNCLEQQENTYVFVLEHNENAFIGATPERLLLLQENNISTACVAGSIPRGKTVGEDNQLGSQLLNDMKNQVEHQIVVEAIERDMSQITETLSEKGQPSLLKNRDIQHLFYPFSGEKKADVSFFSAIEQLHPTPALGGQPKELTTKWIREHEPINRGLYGAPIGWSSVILEEGEFAVGIRSALLSGKSATLYAGCGVVADSIPQEELKETRVKFQPMLRAIGGEENVTSK

SEQ ID NO: 94240 - protein, 437 aa, Mesocricetibacter intestinalis
  misc_feature (1)..(437): tr|A0A4R6VBV8|A0A4R6VBV8_9PAST Isochorismate synthase M enF OS=Mesocricetibacter intestinalis OX=1521930 GN=men F PE=3 SV=1
MDNLRSLKARLNTKINAMLCSKNGSELGCLQESIAFSADLLGWLKMQSCYPQFYWRSRNPAQSDSEVIAALGEVRRFEDVRQANLFIQAQPFTLIGGLTFDGKGYFCLPRLLLQQHDNHLRLSLFWDNLQDWERERQALLQVLQGLESCAALSAPEYPIRPLAAKAEAQQWCSWVEKALQYIERGELNKVVLANQTAFVSSRPINPIDLLAESEKCNNGCYHFLFARSAHQAFLGSTPERLYLRRESHLYTEALAGTAAMSEDKEFNRQQGEWLLQDSKNDYENRLVVQDICDNLRPISRQIEVGEVSLKQLRRVQHLRRKISAELNPGYADEACLQAIHPTAAIAGLPRRKALDFLAATETFERGWYAGTLGFMNKSGAEFCVTIRSALIEGNKIAVFAGAGIVSGSEPEQEWREIERKASGLLSLLQKRGEQSCQ

SEQ ID NO: 94241 - protein, 397 aa, Mesorhizobium sp.; identical to SEQ ID NO: 93451
  misc_feature (1)..(397): tr|A0A4S0VN44|A0A4S0VN44_9RHIZ Isochorismate synthase O S=Mesorhizobium sp. M00.F.Ca.ET.170.01.1.1 OX=2500524 G N=EN813_003240 PE=4 SV=1

SEQ ID NO: 94242 - protein, 432 aa, Metakosakonia sp.
  misc_feature (1)..(432): tr|A0A348DAR0|A0A348DAR0_9ENTR Isochorismate synthase M enF OS=Metakosakonia sp. MRY16-398 OX=2487150 GN=menF P E=3 SV=1
MLSISVALEQLREKLSGIDANSPGFYVFDVAFALNDAFDPLTFLASQPCFPQFYWQQRSGEDEAAALGQVLRFPSLAEARHFLNDNPEHDLRVWGLNAFDPQQGELFLPRLEWRREGGRASLRLIVLNGNAQQNDVAQARSFIDALVRAKSLPDVQMELVSQYHFPQQSGWEALVTQATQAITRGEMDKVVLARATDYHFSQPVNAAAVMAASRRLNHHCFHFFIAFDPHNAFLGSSPERLWRRRGTSLRTEALAGTVANDTDDTRATELGDWLMNDDKNQRENMLVVEDICQRLRHATSTLDVLPPQIVRLRKVQHLRRCIWTEMHHNDDAQCLTLLQPTAAVAGLPRLAARAFITQHEPFEREWYAGSAGYLSLKQSEFCVALRCAKIRGTTVRLYAGAGIVAGSDPTMEWQEIENKAAGLRSLLIMKHV

SEQ ID NO: 94243 - protein, 396 aa, Methylocystis hirsuta
  misc_feature (1)..(396): tr|A0A3M9XTF1|A0A3M9XTF1_9RHIZ Isochorismate synthase O S=Methylocystis hirsuta OX=369798 GN=D1O30_04525 PE=4 S V=1
MNAVSLPPSHSSIEANPTFLFTSPHRSIKAFGVAEKICLSACGAAHSDSFLQTAVQGAINRARQAGQANPIVAGAIPFDIRQPCSLFVPMSYTAFARESLMVEERRSERAPTVLGMRSLPDKDAFKDAVTRAITSFRAGKTSKAVLSRILEIELAQPVDVAAILNALVRQNPNGYHFKAPLGDGAILLGASPELLIRKDGAAIRSNPLAGSAKRRSDPDEDQLASRTLLQSNKDNFEHRLVVDEIQEALEPVCKALTTPAGPALMNTSTMWHLSTLITGELANHRTSALQLACRLHPTPAVCGYPTAESRSLISALEPFDRGVFSGAVGWCDSEGDGEWAVAIRCGTVHDKAIRLFAGAGIVEASDPESEWAETEAKLGTMLRAFGIETEERPACR

SEQ ID NO: 94244 - protein, 396 aa, Methylocystis rosea
  misc_feature (1)..(396): tr|A0A3G8MC27|A0A3G8MC27_9RHIZ Isochorismate synthase O S=Methylocystis rosea OX=173366 GN=EHO51_17315 PE=4 SV= 1
MNAINLAPSVSTIEANPSFVFTSPHRSLKAFGVAERICLSACGAAHSDSFLQMAVQGAINRARQAGQVNPIVAGAIPFDIRQPCSLFVPMSYTEFVRESLMVEERRSERAPTVLGMRSLPDKDAFKDAVTRAITSFRAGKMSKAVLSRILEIELAQPVDVTAILNALMKQNPSGYHFKAPLGDGAILLGASPELLIQKDGAAIRSNPLAGSAKRRSDPEEDRLASRKLLQSNKDNFEHRLVVDEIQEALEPVCKALTTPTEPALMNTSTMWHLSTLITGELANHHTSALQLACRLHPTPAVCGYPTAESRSLIGALEPFDRGVFSGAVGWCDSEGNGEWAVAIRCGTVHDKAIRLFAGAGIVEASDPESEWAETEAKLGTMLRAFGIETGERPACR

SEQ ID NO: 94245 - protein, 389 aa, Methylomonas sp.
  misc_feature (1)..(389): tr|A0A2N0V651|A0A2N0V651_9GAMM Isochorismate synthase O S=Methylomonas sp. Kb3 OX=1611544 GN=CWO84_14110 PE=4 S V=1
MGDQQPTAIELLHRYGAGSSFFLGSPERTLLGSGIRARLTRHPGEPTAAALQRLFADVRQKDDTPAIAVGALPFAPEADPVLFIPQQMATAGRLTRHAIARTKATIRSSVTQERPTPAVYAQQVQQALDLIRQSALKKVVLSRMLEVVGESDVDQAGVLRNLAARNAAGYTFAVDLPTVSGGVRRLIGASPELLLRRKGTQVLANPIAGTEPRSIDPGEDLARSRRLLHSAKDRHEHALVVAAVADTLRPYCRTLEVPPVPELIATPRVWHLSTRICGQLSHYAPSSFDLAIALHPTPAVCGEPRDLARQAIEQLEDFDRGLFTGLVGWCDANGDGEWAVTIRCAEIEANRAKLFAGAGIVADSEPWREVAETSAKFRTLLDALQGDGV

SEQ ID NO: 94246 - protein, 395 aa, Methylosinus sporium
  misc_feature (1)..(395): tr|A0A549SMU6|A0A549SMU6_METSR Isochorismate synthase O S=Methylosinus sporium OX=428 GN=FM996_14985 PE=4 SV=1
MDAIVAERPSREISAQAEKPSFLFSSPHFAIEAYGVFERIRTPAVGGGGVDSVLQAAVDAALARARRAGQDHPIVVGAIPFDSRQPSFLFAPKTHRISAPRMATSAPAAKASVPALWYRSVPGQSGFEKAVAQAVANFRDGHARKAVLSRILEIEFAERVDAVAILEILRRQNPAGYHFHAPLPDGGVLLGASPELLIRKIGGSIRSNPLAGSAKRVAEPEEDARVGRCLLQSSKDNFEHRLVIDEIRRLLEPLCAELRIPDEPALMSTPTMWHLSTAISGELADGRLSVLQLASLLHPTPAICGSPTAQARMLIERLEPFDRGFFAGIVGWCDESGDGEWAIAIRCGTVNEMVVRLFAGAGIVEASDPRAEWAETEAKLATMLRAFGVEREIAQ

SEQ ID NO: 94247 - protein, 380 aa, Microbacteriaceae bacterium
  misc_feature (1)..(380): tr|A0A3N7HVI0|A0A3N7HVI0_9MICO Isochorismate synthase O S=Microbacteriaceae bacterium OX=1873462 GN=EAS51_09000 PE=4 SV=1
MRRGEGVAGLGEALRLTFRGPDRIAQAAETWRRIAAAATIDDPVRRSGSGLLAFGAFTFDESSRYESVLIVPRTIVGRRDGVTWITEVAVAGDDTPAPEPTPSALGTEFRLALQPGDVGPELYRDLVAQAVDRIRAGELRKVVLARDLVGHLPEGGDLRRVLTDLALGYPDTWTFAVDGHIGSSPETLVRVSHGKVTARVLAGSIARGADADADHAAALKLATSTKDLDEHRYAVQSVLDALAPHARAGVSASEIPFTLKLPNLWHLATNIEGTLSDVSSALDLAAALHPTAAVAGTPTAKAMDLIRELEPLDRGRYGGPVGWVDADGDGKWAVSLRSAEVAPDGDIRAFAGGGILAASDPDVELAETKLKFRPVVEAFA

SEQ ID NO: 94248 - protein, 421 aa, Microbacterium azadirachtae
  misc_feature (1)..(421): tr|A0A0F0KZZ3|A0A0F0KZZ3_9MICO Isochorismate synthase D hbC OS=Microbacterium azadirachtae OX=582680 GN=dhbC PE =4 SV=1
MSAGLVVQTREFDLQGDLLGYADPADPRAWLRRGDGIVAVGAETARVVRAARGPESRTSALARAWDDIRASATVDDTVQLPGTGLVAFAALVFDEESSAESVLLVPRTVIGRHGGRTWITHVLDAPASGDTDGSAIPAPTALGPHWAGTLGPGAQTAQGYQASVRAALSAIAEAQYGKVVLARDLVGTVPAGSDLRRLVRALSTEYPDTWAFAVDRLIGASPETLVTVQDGVVTARVLAGTTARGADAVTDARAAAALADSPKDNDEHAFAVRSVVASLAPHTTALDADGGPFILELPNLFHLATDVRARLSDGASALDLAAALHPTAAVAGTPTDAAVAAIRELEPFDRGRYAGPVGWIDARGNGEWAIALRCAQFGVAGSGVPIPLTAYAGAGIVAGSDPEAELLETRVKFRPIVDALA

SEQ ID NO: 94249 - protein, 404 aa, Microbacterium enclense
  misc_feature (1)..(404): tr|A0A3S3LL36|A0A3S3LL36_9MICO Isochorismate synthase O S=Microbacterium enclense OX=993073 GN=D8Y23_07540 PE=4 SV=1
MDDVLDYTPGYDPLFWSRRGESLAGFGDLLTLRYTGAQPGDATIADRWRRIAAAAEVDDPLCLPGTGLVAFGSFVFDPRSERESVLRVPGTIVGRHGGRAWVTRLAFADTPDEPEPDLPPRSPFGPHWSATLGPGRQSAEGYQDAVRQAIDAIRAGEVGKVVLARDIVGTVPAGADRRRLLRALLEGYPDCWVFAVDGLIGASPETLVTVSRGTVTARVLAGTVARGGDADSDVAAAVALTESAKDQEEHRFAVQSVLASLRPHTSALAAGEQPFTLKLPNVWHLATDVEGELSEAASALDLITVLHPTAAVAGTPTAAAMEVIRRLEPFDRGRYAGAVGWIGASGDGEWAIALRCAQIDPAAPSSPTAPITAYAGAGIVADSVPESELLETRVKFRPIVEALA

SEQ ID NO: 94250 - protein, 421 aa, Microbacterium esteraromaticum
  misc_feature (1)..(421): tr|A0A1R4J1M2|A0A1R4J1M2_9MICO Isochorismate synthase @ Menaquinone-specific isochorismate synthase OS=Microba cterium esteraromaticum OX=57043 GN=FM104_05025 PE=4 SV =1
MSSIRLVAQTREIPPVEDLLAHTSPVRPLAWLRRGDGFVAAGEGMAASIRVPAGRGAVRSAIIADAWRELVANAEIDDLIGMPGTGLVALGALTFDEDSAADSLLIIPQTIIGRRDGRSWITRIRDSDAEFAPVADASAYAPHWAGRVGPGAQTPQGYQESVQLALDEIAADAYSKVVLARDLTGTVPGDADLRRLVRALSSGYPDTWTFAVDGLIGASPETLVTVHERTVTARVLAGTTARGADPDADNAASAALASSGKDLDEHEYAVQSVLASLRPHTRTLAASEQPFTLKLPNLFHLATDVEGELDDGASALDLVGAMHPTAAVAGTPTATAVAAIRRIEPFDRGRYAGPVGWIDAAGNGEWAIALRCAQFAETPDSASGARRVTAYAGAGIVAGSDPESELLETRVKFRPLVDALA

SEQ ID NO: 94251 - protein, 421 aa, Microbacterium foliorum
  misc_feature (1)..(421): tr|A0A4Y5YSP0|A0A4Y5YSP0_9MICO Isochorismate synthase O S=Microbacterium foliorum OX=104336 GN=FIV50_13890 PE=4 SV=1
MSSRLVVETREIDPVEDLLAYADPSRPLAWLRRGDGIVAVGDGVVETIRIPAGAAPMRSAAIAAAWRDLAQDAEIDDELALPGSGLVAFGALTFDEGSSADSVLVVPALVIGRHHGRTWLTRIRSSSTSHPALDPQSEASTIGYGPHWAGTVGPGAQSPQGYQDSVRQALARIADGELSKVVLARDLTGSIPAGSDLRRLVRALSTGYPDTWAFAVDGLIGASPETLVTVQQRTVTARVLAGTIGRGADADADTAASAHLASSTKDLDEHEYAVQSVLASLRPHTRALAASEQPFLLKLPNLFHLATDVEGELADGGSSLDLVGALHPTAAVAGTPTSAAIAAIRELEPFDRGRYAGPVGWVDAAGNGEWAIALRCAQFTPAETAIAVTAYAGAGIVAGSDPESELLETRVKFRPLVDALA

SEQ ID NO: 94252 - protein, 430 aa, Microbacterium ginsengisoli
  misc_feature (1)..(430): tr|A0A0F0LXQ5|A0A0F0LXQ5_9MICO Isochorismate synthase D hbC OS=Microbacterium ginsengisoli OX=400772 GN=dhbC PE =4 SV=1
MTLPAPPRLVAVTRETIAHEDLLALADPHTPLVWSRRGDGFVGIGRPLIALEASADAATRLASTWRAIADAASVDDEVHAPGTGLLAFGSLAFDEHAEARSRSGATSRLVVPPVVVGRTGGKTWITRITREEASDQGEDVAPIPYGPYWSATLGPGAQSPDDYTRAVAEAVARIGDGELEKVVLARDLVGSVPAGADLRRLVRALQSGYPDTWTFAVGGLIGASPETLVTVHDGTLTARVLAGTAARGADADRDAAAAVALATSQKDLDEHRFAVQSVLGALAGHTRAVTAAETPFTLKLPNVWHLATDVEGDLGHEASALDLVAVLHPTAAVAGTPTASALATIRELEPFDRGRYAGPVGWIDGDGDGEWAIALRCAQFGAESSSPTAEDRDDIPVTAFAGAGIVASSDPEAELLETRVKFRPIVDALA

SEQ ID NO: 94253 - protein, 429 aa, Microbacterium hatanonis
  misc_feature (1)..(429): tr|A0A5C8HZN7|A0A5C8HZN7_9MICO Isochorismate synthase O S=Microbacterium hatanonis OX=404366 GN=FVP77_00845 PE= 4 SV=1
MTPDTLPLPRLRVVTREIDPVEDVLSYTPSYAPAFWSRRDASLAAFGSIHELRAAGGVESPARFVAERWRAIAAAAEIDDPVGLPGTGLIALGSFTFDPRSAKTSTLTVPWIVVGRRGGRSWVTRISHADSVVDDELLGLPARVPYGPHWSATLGPGAMDPDAYQGAVRAALGAIERHEVDKVVLARDLVGTAPVGADLRRLVRSLASGYPDCWIFAVDGLIGASPETLVTVSAGTVTARVLAGTTARGADVDADAAASVALATSPKDQDEHRFAVQSVLASLRPHTSALAAAEQPFTLRLPNVWHLATDVEGVLSDAASSLDLLEALHPTAAVAGTPTRDAVELIHRLEPFDRGRYAGAVGWVDGAGDGEWAIALRCAQFDIDAAPAGSRDAIPLTAYAGAGIVAGSDPESELLETRVKFRPIVEALA

SEQ ID NO: 94254 - protein, 416 aa, Microbacterium hydrocarbonoxydans
  misc_feature (1)..(416): tr|A0A0M2HQB0|A0A0M2HQB0_9MICO Isochorismate synthase D hbC OS=Microbacterium hydrocarbonoxydans OX=273678 GN=d hbC PE=4 SV=1
MSTKLVVETREIDPVEDLLAYADPDQPLAWLRRGDGIVAAGDRIVTAIRVPAGTDAARSAIIASAWRQLAQDADIDDPLGLPGTGLVGFGALAFDEHSIADSVLLVPSAVIGRHRGRSWLTRIRTADSAPSTAPAAKTYGPHWAGTVGPGAQSPQGYQDSVRGALARIADGELSKVVLARDLTGSIPAGSDLRRLVRALSTGYPDTWAFAVDGLIGASPETLVTVQNRTVTARVLAGTIGRGADADADTAASAHLASSTKDLDEHEYAVQSVLASLRPHTRVLAASEQPFLLKLPNLFHLATDVEGELAEGESSLDLVGALHPTAAVAGTPTVAAIAAIRQLEPFDRGRYAGPVGWVDAAGNGEWAIALRCAQFTGGAGEIAVTAYAGAGIVAGSDPESELLETRVKFRPLVDALA

SEQ ID NO: 94255 - protein, 422 aa, Microbacterium ketosireducens
  misc_feature (1)..(422): tr|A0A0M2H1Z9|A0A0M2H1Z9_9MICO Isochorismate synthase D hbC OS=Microbacterium ketosireducens OX=92835 GN=dhbC P E=4 SV=1
MVETREIDPVDDLISFTDPNTPLAWLRRGDGIVGLGHQVTGIEFGGAHPLPEADPFPSLAEMWRSLCETAEVDDEVGLPGTGLVAFGALAFDRRSAASSRLIVPQTVIGRGRGRSWVTRIRSSAYDGPDPAIATVPYGPYWSATLGPGTLDPEGYQAAVRQGIAAIESGEVQKVVLARDLVGTIPAGSDIRRLARALSTEYPDTWTFAVDGLVGASPETLVTVSHGTVTARVLAGTVPRGADSDGDATASFSLAHSAKDRDEHRFAVQSVLDALAPHVGAVTADAEPFTLELPNLWHLATDVEAELADHATSLDLVAALHPTAAVAGTPTDAAIEAIRRIEPFDRRRYAGPVGWVGADGDGEWAIALRCAQIGADPTRGYAEFSDTIPVVAHAGAGIMAESDPESELLETRVKFRPIVDALA

SEQ ID NO: 94256 - protein, 420 aa, Microbacterium laevaniformans
  misc_feature (1)..(420): tr|A0A4S2D004|A0A4S2D004_9MICO Isochorismate synthase O S=Microbacterium laevaniformans OX=36807 GN=E5344_13030 PE=4 SV=1
MSSAPLLPPRLRIVSREIAAIDDLLEYADPADPLVWARRGSWLVGVGSALRMEVPAADAATLADRWRAVAAAATVDDHVGVSGSGLIAFGALPFDVQSAATAVLTVPRMTIGTRDGRTWVSWVLPDDGAPEPDEPRAIGYGPHWSAAVGPGALTPEGYQDAVRAGLAAIASGEVSKVVLARELAGTVPAGADLRRLARSLASSYPDTWVYAVHGLIGASPETLVTVSGGQVTARVLAGTVARGAGPDADREAALRLATSAKDLAEHQYAVRSLVDALSPHASALAAAEQPFTLALPNVWHLATDVEATTAPETSALDLLGVLHPTAAVAGTPTAAALAAIRRIEPFDRGRYAGPVGWVDANGDGEWAIALRGAQFDLAAADADGIPFRAHAGAGIVAGSDPEAEMLETRVKFRPIVDALA

SEQ ID NO: 94257 - protein, 424 aa, Microbacterium lemovicicum
  misc_feature (1)..(424): tr|A0A3Q9J429|A0A3Q9J429_9MICO Salicylate biosynthesis isochorismate synthase OS=Microbacterium lemovicicum OX =1072463 GN=pchA PE=4 SV=1
MSSRPAHTAPPRLRSITREIEAVEDVLAYTPGYDPLFWSRRGDAMAGFGSVLSFGARPGVGIAQIAATWRTLSAAASVDDPVGVPGSGLVAFGAFVFDPRSARRNTLIVPDTIVGRRGGRSWVTRIGYVDAEGLEPELPPRTPFGPHWSATLGPGAMTPEGYMNAVADAVEAIRARRLDKVVLARDLVGTIPAGSDLRRLVRELMTGYPDCWTFAVDGTIGASPETLVSVAHGTVTARVLAGTSARGADADADAAASLALATSSKNQDEHRFAVRSLLDTLRPHTSALAAADEPFTLKLPNVWHLATDVEGTLGDASSALDLVQALHPTAAVGGTPRAVAIDEIQRLEPFDRGRYAGAVGWTDAAGDGEWAVALRCAQVGPAVVGAPTIPVVAHAGAGIVVDSDPESELLETRVKFRPIVDALA

SEQ ID NO: 94258 - protein, 398 aa, Microbacterium mitrae
  misc_feature (1)..(398): tr|A0A5C8HRU7|A0A5C8HRU7_9MICO Isochorismate synthase O S=Microbacterium mitrae OX=664640 GN=FVP60_05200 PE=4 S V=1
MRVDELLTLTAPDAPLSWWRRGDGFVGFGVAATLTATGPQRTRELARLWREYVATAEVDDAVGVAGSGLVAFGAIAFDDESAAQSTLIVPRVIVGQRGDIAWITTVTPHGAAAQVPVETPFGDYWPATLGPGLLTPEGYQQAVRDGLTAIAEGVVGKVVLARDIVGTIPADADLRRLSRALQAGYPDCWNFAVDGLIGASPETLVTVSKGRLTARVLAGTASRGADADADTAAATALATSQKDQDEHRYAVASVTTALAAHTTALAASEQPFMLKLPNVWHLATDIEATLGESESSLDLVAVLHPTAAVAGTPTAAALQVIRDIEPFDRHRYAGPVGWIDAAGDGEWAIALRCAQFEPADDHIAVTAHAGAGIVAGSDPEKEMLETRVKFRPIIDAIA

SEQ ID NO: 94259 - protein, 416 aa, Microbacterium oleivorans
  misc_feature (1)..(416): tr|A0A4S3PG38|A0A4S3PG38_9MICO Isochorismate synthase O S=Microbacterium oleivorans OX=273677 GN=E1I21_04180 PE =4 SV=1
MTSTALGAPRLHAVTRRIEELEEPLSYASPDDPMVWSRRGDLFIGVGRAAELPAGAPAAEWWRDVAAAAEIDDKVRMPGSGLIAFGALPFDPANSSASAALTVPRMIIGRRGDTTWVTHVFVDGEDERPQPASITFGPHWSATVGPGACTPDGYQGEVRAGLDAIASGEVAKVVLARDLVGSVPAGSDLRRLVRALTSAYPDTWTFAVDGLIGASPETLVTVSGGTVTARVLAGTAARGADADADTAASLALATSPKDLDEHRYAVQSVLTSLRGHTSALVAEPEPFMLKLPNVWHLATDVEGTLSGRASSLDLVEVLHPTAAVAGTPTQAALEVIRRVEPFDRGRYAGPVGWIDAAGDGEWAIALRCAQFDVHTDVGSDIPLIAHAGAGIVAGSDPETEMLETRVKFRPIVDALA

SEQ ID NO: 94260 - protein, 422 aa, Microbacterium oxydans
  misc_feature (1)..(422): tr|A0A3Q9J5F7|A0A3Q9J5F7_9MICO Isochorismate synthase D hbC OS=Microbacterium oxydans OX=82380 GN=dhbC PE=4 SV= 1
MHTPHLVVETREIDAVEDLLAYADPARPLAWLRRGDGIVAVGQTLSEIRPPAHAEASRVTSLASAWRDMAAHAEVSDPMELPGTGLVAFGTIAFDEDSTADSVLVIPTQVIGRHGDRFWRTTIRFAGAAQAGAPEHQVDLVTQPYGPHWAGTVGPGAQTPQGYQDSVRRALTRIADGEVSKVVLARDLTGSIPAGSDLRRLVRALSTGYPDTWAFAVDGLIGASPETLVTVHGGTVTARVLAGTIGRGADADADTAASAHLASSVKDLDEHQYAVQSVLASLRAHTRALAASEQPFLLKLPNLFHLATDVEGELACGETALDLVRALHPTAAVAGTPTPAAIAAIRELEPFDRGRYAGPVGWVDAAGNGEWAIALRCAQFTERAGEIGVTAYAGAGIVAGSDPESELLETRVKFRPLVDALA

SEQ ID NO: 94261 - protein, 420 aa, Microbacterium paludicola
  misc_feature (1)..(420): tr|A0A4Y9FX33|A0A4Y9FX33_9MICO Isochorismate synthase O S=Microbacterium paludicola OX=300019 GN=E4U02_06055 PE =4 SV=1
MVETREADPVEDPLLWASRSWPLAWQRKGDMLVGAGTEILRLDVTGPDRIARIAASWREIMAAAEVDDEVRVPGTGLVAFGAFAFDDGSAQRSTLTVPSTILGRRGGRHWITRIRNARAAAPDEAPQPSDYGSHWSATLGPGRMDPAAHGDAVREALAAIEAGEVKKVVIARDIAGSVPVDADLRRLVRALASGYPDTWTFAVEGIIGASPETLVTVRGGEVTARVLAGTRPRGADADEDSAIIAELAANPKDVDEHEYAVRSVVDALRPHTSALASAEQPFTLKLPNLWHLATDVEGTLSNGSTALDMVRALHPTAAVAGTPREAAMAAIRRIEPFDRGRYAGPVGWIDGNGDGEWAIALRCAQFGVPGETTDRGWMIDPDGTRPVTAHAGGGIVAGSVPEAELLETRVKFRPIVDALA

SEQ ID NO: 94262 - protein, 449 aa, Microbacterium radiodurans
  misc_feature (1)..(449): tr|A0A5J5IVC0|A0A5J5IVC0_9MICO Isochorismate synthase O S=Microbacterium radiodurans OX=661398 GN=F6B42_05120 P E=4 SV=1
MVNDSAPAVRLRVITRDIDPIDGVDDLLAVTDPQDPTVWSRRGDVLVARGRAAEFGSVDGADGAHGAREVSAWWRDIVAAAEVDDPVGLPGTGLVAFGALPFDVRADVRRAGPAPTSFFVPRVIVGRRGARSWVTTIVDATSDAQVDAEADAAAAPPERVGFGPHWSATVGPGALTPDAYQRAVRAGIDAIDDGEVEKVVLARDLAGTVPADADLRRLVRALSSSYPDTWAFAVDGLIGASPETLVTVSHGTVTARVLAGTIARGADADADTAASLSLATSAKDLDEHGYAVRSVLEALRPSTSSLVAGEQPFMLKLPNVWHLATDVEGELAGDASSLDLVAALHPTAAVAGTPTVAALDVIRRLEPFDRGRYAGPVGWIDARGDGEWAIALRCAQFHLEARPDAASPTAAAPIPFTAYAGAGIVAASDPESEMLETRVKFRPIVDALA

SEQ ID NO: 94263 - protein, 434 aa, Microbacterium rhizomatis
  misc_feature (1)..(434): tr|A0A5J5J8X1|A0A5J5J8X1_9MICO Isochorismate synthase O S=Microbacterium rhizomatis OX=1631477 GN=F6B43_07825 P E=4 SV=1
MIDAPRLFVETREIEPVDDLLEYADPRQPLAWLRRGEGMVALAGSTAVATLRVDAAPSEASPLSRATRLARAWRDLTAVAEVDDAVGVPGTGLVGFGALAFDDASASPSSIIVPSAIIGRRGGRSWLTRIHAPIEHSPPPLAPAPPLAPAPYGPYWSGTLGPGSLGPEGYQDAVRDALAAIATGEVSKVVLARDLVGTIPAGSDLRRLARALSSEYPDTWTYAMDGIIGASPETLVTVSAGTVTARVLAGTTSRGGDADADAAASVRLATSAKDLDEHRYAVHSVLQSLRPHTSALAASEQPFMLKLPNVWHLATDVEGALSDAASSLDLVAALHPTAAVAGTPTDAALALIARLEPFDRGRYAGPVGWIDASGDGEWAIALRCAQFGSAPARAHAETTRVVAHAGAGIVAGSQPESELIETRVKFRPIVDALA

SEQ ID NO: 94264 - protein, 422 aa, Microbacterium saccharophilum
  misc_feature (1)..(422): tr|A0A5C8HXT3|A0A5C8HXT3_9MICO Isochorismate synthase O S=Microbacterium saccharophilum OX=1213358 GN=FVP74_082 55 PE=4 SV=1
MSDPSFSRARLRAVTRQIDAVEDLLEYASPHEPTVWSRRGDMLVGIGSALAFTGRLRPEGTELTRWWHEVTAAAEIDDPVRVPGTGLVAFGALPFDPESAAMASFTVPAVILGRRDGRSWVTRIQQVDGAETPAALPTPTPYGPHWSATVGPGTLTPDGYQDAVRAGLDEIRAGAVSKVVLARDLAGTVPAGSDLRRLVRALAAAYPDTWTFAVDGLIGASPETLVTVSGGTVTARVLAGTVARGADADADTAASVALATSAKDLDEHQYAVQSVLAALRPHTSALVSEEQPFMLKLPNVWHLATDVEGALDAGASALDLLGALHPTAAVAGTPTQTAIELIRRLEPFDRARYAGPVGWIDAHGDGEWAIALRCAQFDLETGRNGRIPFTAHAGAGIVAGSDPEAEMLETRVKFRPIIDALA

SEQ ID NO: 94265 - protein, 411 aa, Microbacterium sediminis
  misc_feature (1)..(411): tr|A0A4P7FCI9|A0A4P7FCI9_9MICO Isochorismate synthase O S=Microbacterium sediminis OX=904291 GN=E3O41_10905 PE= 4 SV=1
MPRLVATTREIDPTDDPLLFASSADPIAWLRRGDGLIGAGPELLRLDVGEDGRLDALADMWRAIAQATDVDDPIGLPGTGLVGFGAFAFDETSTHPSTLIVPTTVIGRRGGRAWVTTIGRAEGTVPAPQPHDYGAYWSATLGPGAMDPEAHGAAVRAALEAIRSGELSKVVVARDIAGTIPAGADLRRLVRALASGYPDTWVYAVDGIIGASPETLVTVSGGTVTARVLAGTRPRGADADEDAAITAELAASEKDNAEHDYAVQSVLRSLHPHTSALAAAEQPFMLRLPNLWHLATDVEGTLENGSTALDMVRALHPTAAVAGTPTDAAVAAIRRIEPFDRGRYAGPVGWIDGNGDGEWAIALRCAQFGPVEGDTRTVVAHAGGGIVEGSVAEAELLETRVKFRPIVDALA

SEQ ID NO: 94266 - protein, 423 aa, Microbacterium sp.
  misc_feature (1)..(423): tr|A0A519GW43|A0A519GW43_9MICO Isochorismate synthase O S=Microbacterium sp. OX=51671 GN=EOO67_09210 PE=4 SV=1
MSSAPARSPRLHAVTREIEPIEDLLAYADAADPTVWSRRGDMLVGAGGAVLSFRRPHTSGDTASRWWRGIAEAAEIDDPVGLPGTGLVAFGALPFDADSQADAVFTVPRVVLGRRGGRTWITHISPAGERPGETPEPAAYGPHWSATLGPGALTPDGYQVAVRAGLDAIVAEEVAKVVLARDLAGTVPAGSDLRRLVRALATAYPDTWTFAVDGLIGASPETLVTVSGGTVTARVLAGTMARGADADADTAASVTLATSAKDLDEHQFAVQSVLTALRPHTSALVSEEQPFMLKLPNVWHLATDVEGALDGGASALDLVGALHPTAAVAGTPTAAAIGVIRRLEPFDRGRYAGPVGWIDGDGDGEWAIALRCAQFGIAAPTAASGSPVPLTAYAGAGIVAGSDPEAEMLETRVKFRPIVDALA

SEQ ID NO: 94267 - protein, 432 aa, Microbacterium trichothecenolyticum
  misc_feature (1)..(432): tr|A0A0M2HJF4|A0A0M2HJF4_9MICO Isochorismate synthase D hbC OS=Microbacterium trichothecenolyticum OX=69370 GN= dhbC PE=4 SV=1
MTPSHRPPELVVETREIEHIDDLLTYASPDEPLAWLRRGDGIVGIGWLGGYERGPHSAPGVDPATLPSAAETWRQIAATAEIDDPVGLPGTGLVAFGTLVFDERSSATSRLLIPQAVIGRHRGRSWVTRIRRVSAEVDDVIVEPRPYGSYWSATLGPGTLDPAGYQAAVRGAIDAIVRGELEKVVLARDLVGTIPAGADLRRLVRALADDYPDTWTFAVDGLIGASPETLVTAARGVVTARVLAGTIPRGTDAHDDTAASTSLAHSAKDLDEHRYAVQSVLARLGPHVRHLRADPEPFTLKLPNLWHLATDVAGDLADHASALDLVAELHPTAAVAGTPTDAALDLIRRLEPFDRGRYAGPVGWIDGDGNGEWAIALRCAQIGGEPPRNVAEYSATIPVVAHAGAGIVAQSNPDKELLETRVKFRPIVDALA

SEQ ID NO: 94268 - protein, 407 aa, Microbispora bryophytorum
  misc_feature (1)..(407): tr|A0A544XFG2|A0A544XFG2_9ACTN Isochorismate synthase O S=Microbispora bryophytorum OX=1460882 GN=FLX07_25965 P E=4 SV=1
MSVALIRPLVVRTVAVSDPDDLLARLPDAAPYAWIRHGEGLVGWGEAARAAVPAGPGRFDWARGWLSSLFAGALIEDEVGVPGSGPVAFGSFTFDGHAPGTVLVVPRVVLARRDGRAWLTTIGDSAFDLFSPPREPGRIRYADGSLTAAQWEHRVARAVRRIKDGMLDKVVLARDLTAVAERDIDPRVLLDRLAERYPECYTFSVDGLVGATPELLVRHTGQAVESLVLAGTTARGGGPADDAARGAALYASEKDRHEHAYAVASVREALAPLCSTLNVPDEPELLVLPNVQHLASRVTGRLSDGASVLDVVAAMHPTAAVGGTPTGAAIGVIRELEGMDRGGYAGPVGWIDSRGDGEWGIALRCAYVSGRRARLFAGCGIMAESDPAAELAEAQAKLRVMRYALEG

SEQ ID NO: 94269 - protein, 408 aa, Microbispora hainanensis
  misc_feature (1)..(408): tr|A0A544YBL1|A0A544YBL1_9ACTN Isochorismate synthase O S=Microbispora hainanensis OX=568844 GN=FLX08_34395 PE= 4 SV=1
MSVALIRPLVVRTVAVSDPDDLLARLPDAAPYAWIRHGEGLVGWGEAARAAVPPGPGRFDWARGWLSSLFAGALIEDEVGVPGSGPVAFGSFTFDGDAQGTVLVVPRVVLARRDGQAWLTTIGGSAFDLATPPQEPGRIRYADGSLTAPEWEHRIARAVRRIKADGMLDKVVLARDLTAVAERDIDPRVLLSRLAERYPECYTFSVDGLVGATPELLVRHTGQEVESLVLAGTTARGGGPAEDAARGAALYASQKDRHEHACAVASVREALAPLCSALDVPDEPELLVLPNVQHLASRVTGRLSDGASVLDVVAAMHPTAAVGGTPTGAALGVIRELEGMDRAGYAGPVGWIDSRGDGEWGIALRCAYVSGRRARLFAGCGIMAGSDPAAELAEAQAKLRVMRYALEG

SEQ ID NO: 94270 - protein, 407 aa, Microbispora sp.
  misc_feature (1)..(407): tr|A0A5C4VIA8|A0A5C4VIA8_9ACTN Isochorismate synthase O S=Microbispora sp. CR1-09 OX=1712871 GN=FH610_27945 PE= 4 SV=1
MSVALIRPLVVRTVAVSDPDDLLARLPDAAPYAWIRHGEGLVGWGEAARAAVPPGPGRFDWARGWLSSLFAGALIEDQVGVPGSGPVAFGSFTFDGDAQGTVLVVPRVVLARRGGRAWLTTIGDSAFDLVSPPREPGRIRYADGSLTAAQWEHRVARAVRRIKDGMLDKVVLARDLTAVAERDIDPRVLLGRLAERYPECYTFSVDGLVGATPELLVRHTGQAVESLVLAGTTARGGGPADDAARGAALHASQKDRHEHACAVASVREALAPLCSALHVPDEPELLVLPNVQHLASRVTGRLSDGASVLDVVAAMHPTAAVGGTPTGAALGVIRELEGMDRAGYAGPVGWIDSRGDGEWGIALRCAYVSGRRARLFAGCGIMAGSDPAAELAEAQAKLRVMRYALEG

SEQ ID NO: 94271 - protein, 407 aa, Microbispora tritici
  misc_feature (1)..(407): tr|A0A5D0PZ60|A0A5D0PZ60_9ACTN Isochorismate synthase O S=Microbispora tritici OX=2604471 GN=FXF59_11405 PE=4 S V=1
MSVALIQPLVVRTVAVSDPDDLLARLPGAAPYAWIRNGEGLVGWGEAARAMVPPGPGRFDWARGWLSSLFAGALIRDEVGMPGSGPVAFGSFTFDADAPGTVLVVPRVVLARRDGRAWLTTIGDNAFELARPPVEPGRIRYGDGTLTAPQWEHRVARAVSRIRDGGLDKVVLARDLTAVADRDIDIRVLLGRLARSYPECYTFSVDGLVGATPELLVRHTGQAVESLVLAGTTPRGSGPTDDAARAAALYASKKDRHEHACAVASVREALAPLCSTLHVPEEPELLVLPNVQHLASRVTGRLSDGASVLDVVAAMHPTAAVGGTPTGTALGLIRELEGMDRGGYSGPVGWIDAHGDGEWGIALRCAYISGRHARLFAGCGIMAGSDPAKELAEAQAKLRVMQYALEG

SEQ ID NO: 94272 - protein, 407 aa, Microbispora triticiradicis
  misc_feature (1)..(407): tr|A0A372PGI6|A0A372PGI6_9ACTN Isochorismate synthase O S=Microbispora triticiradicis OX=2200763 GN=DI270_00646 0 PE=4 SV=1
MSVALIQPLVVRTVAVSDPDDLLARLPGAAPYAWIRNGEGLVGWGEAARAMVPPGPGRFDWARGWLSSLFAGALIRDEVGMPGSGPVAFGSFTFDADAPGTVLVVPRVVLARRDGRAWLTTIGDNAFELARPPVEPGRIRYGDGTLTAPQWEHRVARAVSRIRDGGLDKVVLARDLTAVADRDIDIRVLLGRLARSYPECYTFSVDGLVGATPELLVRHTGQAVESLVLAGTTPRGSGPADDAARAAALYASKKDRHEHACAVASVREALAPLCSTLHVPEEPELLVLPNVQHLASRVTGRLSDGASVLDVVAAMHPTAAVGGTPTGTALGLIRELEGMDRGGYSGPVGWIDAHGDGEWGIALRCAYISGRHARLFAGCGIMAGSDPAKELAEAQAKLRVMQYALEG

SEQ ID NO: 94273 - protein, 418 aa, Micrococcaceae bacterium
  misc_feature (1)..(418): tr|A0A358IQV1|A0A358IQV1_9MICC Isochorismate synthase O S=Micrococcaceae bacterium OX=1904863 GN=DEB66_06690 PE =4 SV=1
MVEQLFPRPAAVSRINFSTLQGLKSMNAQLLENHHEETAVEDPSAPTPRTDEATFRFASYGRALIGHGIKATLDAERARRLGLGPAARQLLAERPPGSILAGVVPFDRAADPFLFVPQQVEDLPMRGLTHGGQETSTVAEVVGEYNPQFICAAGAAIDRIKTGTVEKVVLARSLEVFADKEWNPESVWQRLYQQNPAGHSFTIGLPQEEASIVGNSPELIAGVLRGQLTSHPLAGSAPRLTDRTQDQKAAAVLAGSAKNLAEHEFVVRHISTALRSVAKDLIVPSGPDLLPTGQMWHLGTLIRASLYKGLGSLDAALAIHPTPAICGSPTAAAQALISELEPDARGFYGGLVGWMNRDGEGEWALLLRSAVLNGNRATLHAGAGIVADSDPFDEHSETAAKFRTMLCALGVDRAGSSL

SEQ ID NO: 94274 - protein, 415 aa, Micrococcus flavus
  misc_feature (1)..(415): tr|A0A4Y8WZ01|A0A4Y8WZ01_9MICC Isochorismate synthase O S=Micrococcus flavus OX=384602 GN=E4A47_08505 PE=4 SV=1
MSASSPSVAALAARASGLPEGAVPAVARVLVWAREGRVRVGVGGWTVLVTGPRRVERLSAIWRAAVAARPDPSAPAHAWVSSVFDDASPAPAVLRVPARILEAGSAGGEPVEVPARMTEEALRAAVFRDACVRLLPDDDVPLTPEDPAAAWDDAGYAAGVREVLDRMASSGGALGKVVVSRTDTVPADEAALWGAVEALRAQYPQTWVFAVGGLVGATPEMLATRRRGEVTSRVLAGSAPRGADAAEDARNREHLATDPRLAEEHRWAARSVVEVLEPVVELEDVDPAPEVLTLPNVHHLSTSVRGRLRSAEGTVLDVVGPLHPTAAVGGIPRDAALAVIRDVEPVDRGRYAGPVGWLDETGDGEIALALRCGQQVPGGVRLQAGGGIVPGAVPEEEVAEVAAKLLPMRRALGLA

SEQ ID NO: 94275 - protein, 417 aa, Micrococcus luteus
  misc_feature (1)..(417): tr|A0A378NKK9|A0A378NKK9_MICLU Isochorismate synthase d hbC OS=Micrococcus luteus OX=1270 GN=dhbC PE=4 SV=1
MGAMSVRSLLPDLGTPATGTPEAAVPPFARAVLWAHGDDAWRGEGGWTVLLDGTDRLRRLSALWQAAVAGRPDPTAPLRGWISSTFADDSPEPAVLRIPAELRRATPSGVRDVAQHVDADALAAAVAADRGARLLADGAVPLPADVADRAWDDAGYAAGVRELLTRMADSGGELAKVVISRTMTVPADDADLWRAIGALRREYPQTWVFAVGGLLGATPEVLATRHAGLVGSRVLAGSMPRGADEEEDAALRERLASDPRLAEEHRWAARSVLDALAPVVDLADDDPAPTVLTLPNVHHLATSVRGRLRDGRGTVLDVVAALHPTAAVGGTPTMDAVRVIAEVEPVDRGRYAGPVGWLDQDGDGEIALALRCGQQVPGGVRLQAGGGMVPGAVPEEEVTEIRAKFLPMRRALGVAED

SEQ ID NO: 94276 - protein, 461 aa, Micrococcus lylae
  misc_feature (1)..(461): tr|A0A1R4J0D8|A0A1R4J0D8_9MICC Menaquinone-specific iso chorismate synthase OS=Micrococcus lylae OX=1273 GN=FM1 25_05480 PE=4 SV=1
MSAPHENLRSLLPSVHADAAFADAVVWVQGEKALVGAGGWTVLLQGKDRLRRISQLWSRSVKATPQTGTLAMLPVPAAEADEPRPQPAQRAWVAGTFTDASDEPAVLRIPTHWTEQSPQGVKLFVQDVSATALRAAVAVDEAAELAPHGHMPLPAADPERAWDDSGYADGVRAVLERLGRPSEGPEATGEILRKVVISRTETVPADEGALWSALDRLREAYPQTWVFAVGGLLGATPEMLATQHDGAVESLVLAGSVPRGSTVQADAAAKAYIAADHRLADEHHWAARSVWEALTPVLQMDDSTFMPHLLTLPNVHHLATRISGQLKAAAGTVLDVVTRMHPTAAVGGTPTPDAVRVIAEVEPVDRGRYGAPVGWVDGSGDGEIALALRCGQAMRAAEGPDRGAGDGVANAEGEPSPDVAVAVRLHAGGGIVPGADPAEEVTEIGVKFQPMRRALGVDVGA

SEQ ID NO: 94277 - protein, 483 aa, Microcoleus sp.
  misc_feature (1)..(483): tr|K9WC41|K9WC41_9CYAN Isochorismate synthase family pr otein OS=Microcoleus sp. PCC 7113 OX=1173027 GN=Mic7113 _2145 PE=4 SV=1
MPVTPYRTNLFQDRKELHQLLLTGKQQSLVKGCPQIVSISEEIEVLDPLAVLQAIAKPDQLQVYFEKASQREAIAAIDATLCLKTEGTNRFQKAQEFIQTTLDNLLPGGNLNLPFSGPHFFCSFTFFDKKQAVHSPFPAATIFLPRWQISCVQGSCVVVANVEINPQTNLQLLVERLCNQLRRISWYERRVSNVFEIAPHKIIKQAPKNAERFKSSVLSALESIRANQLRKIVLASAIDVLSPKPFNLVDSLDTLRKRHPDCYIFSSSNGKGQNFIGASPERLISIRQHQIEVDALAGSAPRGKTSTEDGAFAYQLLSSEKERREHQFVINFIVEQLSDLGLIPQMLPTPQLLKLSNIQHLWTPIQAQLLGDIHPLEIVAQLHPTPAVAGVPTKMAQEQIRRYETFDRTLYAAPLGWVDYQGNCEFIVGIRSALIESEKPARLFANAYRARLYAGAGIVAGSDPNKEFAEIQLKLQALLKALL

SEQ ID NO: 94278 - protein, 477 aa, Microcoleus vaginatus
  misc_feature (1)..(477): tr|F5UJ93|F5UJ93_9CYAN Isochorismate synthase OS=Microc oleus vaginatus FGP-2 OX=756067 GN=MicvaDRAFT_0857 PE=4 SV=1
MTVIPHRANLLQDRNQLHQFLLNCQQSLTEKDRTKIVSISQEIYPLDPLAVLQEISEPCQRHFYFEKRNPIVGKSFAIAALDSAIHLTVAGTERFALAQNFIRSTLANTITIGAERLPFSGPHFFCSFAFFDENIVANSYFPPATIFLPKWQITRQKDSCILVANTVIEKDLNIKSIAENIWQTFDKIESRKYPKLTTAINSSLSFKQIPVNDASQFKTSVKSALELIASKYFSKIVLSQAINVISQTPFSLIDSLNNLRLSYPDCYVFSTSNGKGQTFIGASPERLISIHSNQLLTDALAGSAPRGKTEAGDAKLAQGLLESEKDIREHQVVIDFIVDRLSKLGITPNFSPVPRLLQLSNIQHLWTPITAQIPPDIHLLKILAQLHPTPAVAGVPRDIALEQIRRCESCDRSLYAAPLGWIDRRGNGEFAVGIRSALIDGDRAILYAGAGIVAGSEPEKELAEIQLKLQPLLNALV

SEQ ID NO: 94279 - protein, 469 aa, Microcystis aeruginosa
  misc_feature (1)..(469): tr|A0A552DRS2|A0A552DRS2_MICAE Isochorismate synthase O S=Microcystis aeruginosa Ma_QC_B_20070730_S2 OX=2486256 GN=EWV80_10525 PE=4 SV=1
MTSAVPRLSYPDSPIADLRGLYNFILNPQLLAAEKGNRSIVSFCQKISPLDLLEILSRIASSYPTHCYWENPERETAFLGYGIAFTATFHGKQRFLKAQKFIENCQQRIIKIDNYSEITPRIFCSFTFFDSATATPFPSATLTLPKFQIIKKQSEYFFLTNLLITGEKEIENSLEETINNLKIIQNNSSNCRQNPHQDPCSYYIHPTYNFQAAVADVLQSIHAQNFSKIVLAHALDVISPRPFHLVNCLDNLRQRHPDCYTFSLGNGRGDHFIGASPERLLTVHQGQLITDALAGSAPRGENAIEDALFANKLLASEKEQREHRAVSDFINQKLRQIGLNPQNSPSRLLKLSNIQHLWTPIHAKLKPSIHPLEIVAQLHPTPAVAGVPTEIALAQIRHYETFDRSLYAAPLGWIDCHNNSEFIVGIRSALIKGDQARLYAGAGIVAGSDPEKELAEIQLKFQALLKALT

SEQ ID NO: 94280 - protein, 469 aa, Microcystis flosaquae
  misc_feature (1)..(469): tr|A0A552L329|A0A552L329_9CHRO Isochorismate synthase O S=Microcystis flos-aquae Mf_QC_C_20070823_S10D OX=24862 36 GN=EWV45_05095 PE=4 SV=1
MTSAVPRLSYPDSPIADLRGLYDFILNPQLLAAEKGNPSIVSFCQKISPLDPLEILSRIAPSYPTHCYWENPEQETAFLGYGIAFTATFHGKQRFLKAQKFIENCQQRIIKIDNYSEITPRIFCSFTFFDSEIATPFPSATLTLPKFQIIKKQSEYFFLTNLLITSEKEIENSLEETINNLKIIQNNSSNCRQNPHQDSCSYYIHPTYNFQAAVADALQSIQAQNLSKIVLAHALDVISPRPFHLVNCLDNLRQRHPDCYTFSLGNGRGDHFIGASPERLLTVHQGQLITDALAGSAPRGENAIEDALFANKLLASEKEQREHRAVSEFINQKLRQIGLNPQNSPSRLLKLSNIQHLWTPIHAKLKPSIHPLEIVAQLHPTPAVAGVPTEIALAQIRHYETFDRSLYAAPLGWIDCQNNSEFIVGIRSALIKGDRARLYAGAGIVAGSDPEKELAEIQLKFQALLKALT

SEQ ID NO: 94281 - protein, 469 aa, Microcystis novacekii
  misc_feature (1)..(469): tr|A0A552JDL2|A0A552JDL2_9CHRO Isochorismate synthase O S=Microcystis novacekii Mn_MB_F_20050700_S1D OX=2486266 GN=EWV54_00060 PE=4 SV=1
MNSAVPRLSYPDSPMADLRSLYNFILNPQLLAAEKGNPSIISFCQKIPPVDPLEILSRIAPSYPTHCYWENPQQATAFLGYGIAFTANFHGKQRFLKAQKFIENCQQRIIKIDNYSEITPRIFCSFTFFDSETVTPFPSATLTLPKFQIIKKQSEYFFLTNLLITGEKEIENSLEETINNLKIIQNNSSNCRQNPRQDACSYYIHPTYNFPAAVADALQSIHAQKFSKIVLAHALDVISPRPFHLVNCLDNLRQRHPDCYTFSLGNGRGDHFIGASPERLLTVHQGQLITDALAGSAPRGENAIEDALLANKLLASEKEQREHRAVSDFINQKLRQIGLNPQNSPSRLLKLSNIQHLWTPIHAKLKPTIHPLEIVAQLHPTPAVAGVPTEIALAQIRHYETFDRSLYAAPLGWIDCQNNSEFIVGIRSALIKGDRARLYAGAGIVAGSDPEKELAEIQLKFQALLKALT

SEQ ID NO: 94282 - protein, 469 aa, Microcystis panniformis
  misc_feature (1)..(469): tr|A0A552QA77|A0A552QA77_9CHRO Isochorismate synthase O S=Microcystis panniformis Mp_MB_F_20051200_S9 OX=248622 3 GN=EWV53_02080 PE=4 SV=1
MTSAVPRLSYPDSPIADLRGLYNFILNPQLLAAEKGNPSIISFCQKIPPVDPLEILSRIAPSYPTHCYWENPQQATAFLGYGIAFTANFHGKQRFLKAQKFIENCQHRIIKIDNYSEITPRIFCSFTFFDSETATPFPSANLTLPKFQIIKKQSEYFFLTNLLITGEKEIEKSLEETINNLKIIQNNSSNCRQNPHQDTCSYYIHPTYNFQAAVADALQSIHAQKFSKIVLAHALDVISPRPFHLVNCLDNLRQRHPDCYTFSLGNGRGDHFIGASPERLLTVHQGQLITDALAGSAPRGENAIEDALLANKLLASEKEQREHRAVSDFINQKLRQIGLNPQNSPSRLLKLSNIQHLWTPIHAKLKPSIHPLEIVAQLHPTPAVAGVPTEIALAQIRHYETFDRSLYAAPLGWIDCQNNSEFIVGIRSALIKGDQARLYAGAGIVAGSDPEKELAEIQLKFQALLKALT

SEQ ID NO: 94283 - protein, 469 aa, Microcystis sp.
  misc_feature (1)..(469): tr|A0A2L2XTX3|A0A2L2XTX3_9CHRO Isochorismate synthase O S=Microcystis sp. 0824 OX=1502726 GN=N0824_03823 PE=4 S V=1
MTSAVPRLSYPDSPIADLRSLYNFILNPQLLAAEKGNPSIISFCQKISPFDPLEILSRIASSYPTHCYWENPERETAFLGYDIAFAATFHGKQRFLKAQKFIENCQQRIIKIDNYSEITPRIFCSFTFFDSATATPFPSANLTLPKFQIIKKQSEYFFLTNLLITGEEEIENSLEETINNLKIIQNNSSNCRQNHHQDPCSYYIHPTYNFQAAVADALQSIQAQNFSKIVLAHALDVISPRPFHLVNCLDNLRQRHPDCYTFSLGNGRGDHFIGASPERLLTVHQGQLITDALAGSAPRGENALEDALLANKLLASEKEQREHRAVSDFINQKLRQIGLNPQNSPSRLLKLSNIQHLWTPIHAKLKPSIHPLEIVAQLHPTPAVAGVPTEIALAQIRHYETFDRSLYAAPLGWIDCQNNSEFIVGIRSALIKGDRARLYAGAGIVAGSDPEKELAEIQLKFQALLKALT

SEQ ID NO: 94284 - protein, 469 aa, Microcystis viridis
  misc_feature (1)..(469): tr|A0A552I642|A0A552I642_MICVR Isochorismate synthase O S=Microcystis viridis Mv_BB_P_19951000_S68D OX=2486270 GN=EWV77_03570 PE=4 SV=1
MTSAVPRLSYPDSPIADLGGLYNFILNPQLLAAEKGNPSIVSFCQKISPLDPLEILSRIASSYPTHYYWENPERETAFLGYGIAFAATFHGKQRFLKAQKFIENCQQRIIKIDNYSEITPRIFCSFTFFDSATATPFPSATLTLPKFQIIKKQSEYFFLTNLLITSEKEIENSLEETINNLKIIQNNSSNCRQNPHWDPCSYYIHPTYNFQAAVADALQSIQAQKFSKIVLAHALDVISPRPFHLVNCLDNLRQRHPDCYTFSLGNGRGDHFIGASPERLLTVHQGQLITDALAGSAPRGENAIEDALFANKLLASEKEQREHRAVSDFINQKLRQIGLNPQNSPSRLLKLSNIQHLWTPIHAKLKPSIHPLEIVAQLHPTPAVAGVPTEIALAQIRHYETFDRSLYAAPLGWIDCQNNSEFIVGIRSALIKGDRARLYAGAGIVAGSDPEKELAEIQLKFQALLKALT

SEQ ID NO: 94285 - protein, 469 aa, Microcystis wesenbergii
  misc_feature (1)..(469): tr|A0A552JSV7|A0A552JSV7_9CHRO Isochorismate synthase O S=Microcystis wesenbergii Mw_QC_S_20081001_S30D OX=2486 245 GN=EWV75_05860 PE=4 SV=1
MTSAVPRLSYPDSPIADLRSLYNFILNPQLLAAEKGNPSIISFCQKISPLDLLEILSRIASSYPTHCYWENLERETAFLGYGIAFAATFHGKQRFLKAQKFIENCQQRIIKIDNYSEITPRIFCSFTFFDSETATPFPSATLTLPKFQIIKKQSEYFFLTNLLITGEKEIEKSLEETINNLKIIQNNSSNCRQNPRQDPCSYYIHPTYNFQAAVADALQSIHAQKFSKIVLAHALDVISPRPFHLVNCLDNLRQRHPDCYTFSLGNGRGDHFIGASPERLLTVHQGQLITDALAGSAPRGENAIEDALLANKLLASEKEQREHRAVSDFINQKLRQIGLNPQNSPSRLLKLSNIQHLWTPIHAKLKPSIHPLEIVAQLHPTPAVAGVPTEIALAQIRHYETFDRSLYAAPLGWIDCQNNSEFIVGIRSALIKGDRARLYAGAGIVAGSDPEKELAEIQLKFQALLKALT

SEQ ID NO: 94286 - protein, 413 aa, Microlunatus phosphovorus
  misc_feature (1)..(413): tr|F5XI89|F5XI89_MICPN Isochorismate synthase OS=Microl unatus phosphovorus (strain ATCC 700054 / DSM 10555 / J CM 9379 / NBRC 101784 / NCIMB 13414 / VKM Ac-1990 / NM- 1) OX=1032480 GN=dhbC PE=4 SV=1
MTATVPFATEPFAERLEPAVQPAIPPGMPLVFGSTDRLLQGRTTDRHWWSARSNDTAYADRIIADLQAESRPDPGASPATAIGTLSFRPDAPALFFPLAAADRAQSVPARLPMRRSPVQLLGARELPDPGGYLENVNQAIARLRGGQNAAKVVLGRWLDLETATPLDPLAVLGSLATTSRGAVRLFAVPAPAVPEGDSEPAILLGASPELLVSRRGRLVRSTPMAGSVPRSSDPATDALRAHALLDSVKDGDEHRYVADAVAAALRPLCDGLVVDGPKLMRTDTVWHLATEIHGRLSDPNLDLSALHLAQLLQPTPAVGGTPTDWALDVIAELEGARSCVAGAVGWVDAAGDGSYAVGIRSGLLSGRRLRLFAGAGIVAASDPESELMETEAKLATMLGGLGLSTAAVKGMIR

SEQ ID NO: 94287 - protein, 466 aa, Microlunatus sp.
  misc_feature (1)..(466): tr|A0A516Q6H4|A0A516Q6H4_9ACTN Isochorismate synthase O S=Microlunatus sp. KUDC0627 OX=2596828 GN=FOE78_22755 P E=4 SV=1
MANAVCRGQSITGSRERRISHAGGVLAERSRATLSRVSTNLSAGGAVDRPRLHVATEEIPDPGRLSGLLPEPGALAWIRRGEGMIAFGEVARHKATSIAEAEQWWRETSAQVVVDRGLDGDEPAGAGFVAFGSFCFDHDNTPSESVLIIPQVVIGRRGGRAWRTTISNVGGDDWPSEDGPAAGAGALPVQSPGAVSFADGKLSGPEWESMIGETVRRINAGKLGKVVMARELLALAANPIDPRWLVARLAADYPACWTYHVDGLVGATPEMLIRRESGLATSRVLAGTIRRSDDADHDLALAAALSQSSKDLQEHEYAVDSVARALAPYCSGMNVPDAPYVLELPNVLHLATDVTAVAGPDASSLAMAAALHPSAAVCGTPTDAARATIAELEQLDRNRYTGPVGWIDADGDGEWAIALRCGRIDPDDPRQIRLYAGCGIVAESDPAAELAESVAKLVPMRDALGS

SEQ ID NO: 94288 - protein, 523 aa, Micromonospora sp.
  misc_feature (1)..(523): tr|A0A4R4QZV4|A0A4R4QZV4_9ACTN Isochorismate synthase O S=Micromonospora sp. KC213 OX=2530378 GN=E1166_09690 PE =4 SV=1
MKDADMMTTAAARTAAAPPSRLDPMTDPADVRRAFAAAHDAARRHGRPVLVAWARPLPRVEPRALLRRADRLSGRVFYWTSRWTGVESLGVGSSLDLSAEGADRFAVVRRAWRRYTRGLVTGGSGIAGRAGFPLLVGGFAFQPGRWHPTGGVPDSLTWCPAAQVVRLGDGSTHLALTARLAADADPTALADARLELAAQLLAETDEQPLPDPAVDSPPRLVVRFDVPDAEQWRRAVGAAVEEIHRGDLTKVVLARQVVLHADQPFAVPAAVDRLAEGFSEGAVFAARFAGYWFLGGTPECLVRVAHGEVTAHSLAGSAARGTTAAADAAGAQSLLDNVKTRHEQSVVTDFVARVLSDVCVDVRASARPGILRLGNVQHLVGTVTAAVPAHRGVGLLDLVERLHPTPAVGGYPRRAALRWIARNEPFDRGWYAAPVGWLDAAQDGEMAVAIRSALVSGDRAALFAGCGIVAGSRPDDEYAETDLKLRPMLTALDAVLDGSAASGPVRSPDAVQDAAAPARWDAA

SEQ ID NO: 94289 - protein, 374 aa, Micromonosporaceae bacterium
  misc_feature (1)..(374): tr|A0A3D4WT77|A0A3D4WT77_9ACTN Isochorismate synthase O S=Micromonosporaceae bacterium OX=1873464 GN=DGT23_1445 0 PE=4 SV=1
MSFYLSTGKSALQTEGVYFAVPPSMRPDSLADLPARTHAVLGLAHAAGQPDPIVVGAIPFDSRAEARLVVPLRRSWSRGGDDTLKSGESPTTTPRSIRVTTAVPSEADYARSVGEAVDRLRAKDFEKVVLARSLRLTGADPLDARQLLARLAEANPGSHVFAVDLGDERTLIGASPELLLSRFGSDVTTHPLAGSTPRSADPIQDKQRAEALLKSGKDLREHAYVVEAITATLSPLCKTVIVPSGPSLVATPTMWHLGTRITAEVADPDDPAVSALALATALHPTPAVCGSPADKAREAIAEYEPFDRGFYAGMVGWGDLRGDGEWAVTIRCGVVDGSSLTLYAGAGVVADSDPQAELAETSAKFRTLLEVLKG

SEQ ID NO: 94290 - protein, 422 aa, Micropruina glycogenica
  misc_feature (1)..(422): tr|A0A2N9JDB9|A0A2N9JDB9_9ACTN Menaquinone-specific iso chorismate synthase OS=Micropruina glycogenica OX=75385 GN=menF PE=4 SV=1
MLEKYLVDGSSVAWIRHGEGMVGLGCYACTDVTSPAEADAWWSTLVEGLDHHSQMPGVAGSGPLAFGSFTFDPDHTEAVSRLIVPKVIIGRRQGQAWLTVLGDGVSPVEIPPLVELVETQLVEQVETSPLVELVEALTAARPTAPRAPRSVRIEVDEAAQARWKERVAEAVRRIETNGLEKVVLARSVTARASEPIDARHLVDTLARDYPSCWTYCIDGLVGASPEMLIRRERGLATSRILAGTIRRSGSDETDLKLASALARSSKNLGEHELAVASVAESLAPLCSGMNVPESPYVLELPNVLHLATDVTAVAHKKAGALRLAAALHPSAAVCGTPTSVARAAIAELEGLDRGRYSGPVGWIDARGDGEWAIALRCGIIDADDPRQIRLFAGCGIVEGSDPDEELAETQAKLVPMVNALLG

SEQ ID NO: 94291 - protein, 439 aa, Unknown
  misc_feature (1)..(439): tr|A0A1J5QZ09|A0A1J5QZ09_9ZZZZ Isochorismate synthase D hbC OS=mine drainage metagenome OX=410659 GN=dhbC_1 PE= 4 SV=1
MNAQPAWSSDDVPRPLLVRTVAIDSLPTGADGLLDLVPRDAPLAWVRRGDGLVGWGEALRITTAGADRFADAERAWHEVLAHSLVRDEVGLPGTGPVAFGSFAFDASSDAGGVLVVPRVVVGRRGGRTWLTTIESGAVLSPGPTLDTVLDRREPVTAPGDVTYTDGAVSAAGWMEVVARGVAAIRAGTVDKVVLARDVVATTAEPVDVRWVLGRLAVDYPSCWTFSVDGMLGATPELLVRSEKGLVTSRVLAGTIRRTGDDDADLGRAAILAHSSKDLEEHEYAVTSVADALAPFCSSTNVPDVPFVLTLPNVLHLASDVTGVLAAGRPGEPAPSSLSLAAALHPTAAVCGTPTAAARALILQIEGMERARYAGPVGWFGADGDGEWGIALRSAEVDPTDPHTLRLFAGCGIVAASDPAAELAESEAKLVPMRHALASD

SEQ ID NO: 94292 - protein, 434 aa, Miniimonas arenae
  misc_feature (1)..(434): tr|A0A5C5B9Z2|A0A5C5B9Z2_9MICO Isochorismate synthase O S=Miniimonas arenae OX=676201 GN=FH969_09510 PE=4 SV=1
MSHAALTDTQPRTLPALTVTTTAITDPVDLLALLPSRHGVAAWLRRGEGFVAWGEAARYDARGPARMRGADVWLHALARTAVVHDAVRLPGSGLLAVGSFAFDDDDPAGGALVVPRVVVGRRTTPTGVRAWVTTIDPDGAPPLPLDAPAEPVVAPRDVHWSAGTTSPEEWKARVAGAVARIRAGEVAKLVLARDAWATSADPLDVRCLLDRFQAAYPSTWTFAVDGLVGATPELLVRRERGLVASRVLAGTIRRTGDDASDLLRAAELARSSKDLEEHEFAVASLAEALTPFVASANVPDSPSVLHLPNVMHLATDVTGALAHDGDGVRPSALVLADALHPTAAVGGTPTDVAVRLVREIEGMDRGRYAGPVGWLGADGDGEFCIALRCGAIDPADERRIRLFAGCGIVAASDPGAELDETEAKLEPVRQALLG

SEQ ID NO: 94293 - protein, 393 aa, Mixta sp.
  misc_feature (1)..(393): tr|A0A506VBI7|A0A506VBI7_9GAMM Isochorismate synthase O S=Mixta sp. BIT-26 OX=2562439 GN=FKM52_08825 PE=4 SV=1
MSGIANAPRITLRQPLHPEDTLFLSPHKSLLARGRIASLTEPAGDGHLASSTFQLRLQQLFEQARHAGVENPIVVGAIPFDKSQPSALYAPAEYHWLDRTAIAAAPAAAQTLAQGARRLQPDHDEFCRMVSAALRQLKRDELQKVVLSRLLHIELPQPQSALRLWQRLNRQNPASYNFHLPLADGVLIGASPELLLRKRGERIDSMPLAGSARRSADAAQDMRLRAALLASRKDRHEHQIVADAIRRQLAERCRSLTLPEPELISTPTLWHLATRVQGCVRHPQENALSLACLLHPTPALCGAPCRHAHALIQRLEPFRRGWFGGIVGWCNAQGDGEWVVTIRCGHIQPQRITLFAGAGIVPDSQPENEWYETGVKLGTMLQALGCAQLQEAS

SEQ ID NO: 94294 - protein, 434 aa, Mobiluncus curtisii
  misc_feature (1)..(434): tr|A0A2X2YYI6|A0A2X2YYI6_9ACTO Isochorismate synthase e ntC OS=Mobiluncus curtisii OX=2051 GN=entC PE=4 SV=1
MLFVHTRALDRDLSPELFPMDAAALPTNGFFFASPPAQGAPLTLAAPGLGDIPGQDFAPAWHWEDGSDLDRAGAAWYLVGRHAQVFDAVQRRGTGPVAFASFGFNSAATPVFVLPSFLVGSDAQGAWITVAYQAESVDEPRADRLYRTALAWIKNFPHRQRQDALQTQPSAVVGKTSYQENVAAAVRAIREGKAEKIVMARPARFEFAGEAGAERARAAGGALASRLRERYPTCWIFNVGGLVGATPEMLLDAAAGRAHSRVLAGTATPGEDVDLAHSAKNLAEHQVALRSVAEPLRRVDPDLEASGPYLLQLPNLTHLATDLHLRVPAGKTLLHLVAQFHPTAAVCGLPREFARTFISRFEADRGRYAGPVGWVDAQGGGQLALALRCAQLDALGVEAWVGAGIMADSDPETEWQETGAKLAPIRDCLNLSAD

SEQ ID NO: 94295 - protein, 434 aa, Mobiluncus holmesii
  misc_feature (1)..(434): tr|E6M4R4|E6M4R4_9ACTO Isochorismate synthase OS=Mobilu ncus holmesii ATCC 35242 OX=887899 GN=HMPREF0576_1304 P E=4 SV=1
MLFVHTRALDRDLSPELFPMDAAALPTDGFFFASPPAQGAPLTLAAPGLGDIPGQDFAPAWHWEDGSDLDRAGAAWYLVGRHAQVFDAVQRRGTGPVAFASFGFNSAATPVFVLPSFLVGSDDQGAWITVAYQAESVNEPRADRLYRAAMSWIKNFPHRQRQDALQTQPSAVVGKTSYQENVAAAVRAIREGKAEKIVMARPARFEFAGEAGAERARAAGGALTSRLRERYPTCWIFNVGGLVGATPEMLLEAAAGRAHSRVLAGTATPGEDVDLAHSAKNLAEHQVALRSVAEPLRRVDPDLEASGPYLLQLPNLTHLATDLHLRVPAGKTLLHLVAQFHPTAAVCGLPREFARTFISRFEADRGRYAGPVGWVDAHGGGQLALALRCAQLDALGVEAWVGAGIMADSDPETEWRETGAKLAPIRDCLDLSAD

SEQ ID NO: 94296 - protein, 547 aa, Mobiluncus mulieris
  misc_feature (1)..(547): tr|A0A378P9X5|A0A378P9X5_9ACTO Isochorismate synthase e ntC OS=Mobiluncus mulieris OX=2052 GN=entC PE=4 SV=1
MLFVSTCPVPVRPLPATDFYFSSPGSLGDGLVLAGCAESPAWEYCGGPAGGITSAEERVNAKTQADDLVKQRGNDILAAAGQTWERVIAQAQVDDQVQRRGTGLVAFVSFGFDAAPPVFAVPRWVFGADAAGAWLTVAYRAEAPRPDLVEFMRCQAETWRVNSGMPLVNPMEPGDGTRAARILVERAENPGRERFEANVRAAAAAIRRGEARKIVCARRVDFPLVKPAPVAQTCARLVELLSAKYRDCWVFSVGGLTGATPEMLLEARGEASNSEAAGVAAGKRVAHARVLAGTARPGEGVNLMESAKNRREHELAVASVVAPLEALLSGSSADVVTNGCANPVVVSPGFQQPEARAFTPGENFPNGGKSGVRLDYKNKARPFFPPSGSQSVPAPHEPEVTGGEAAAAITETVQTRGPYRLELPNLVHLATDVTAPIPPGKTVFDLLGVIHPTAAVAGLPREVALGFIRRQELDRGRYAGPVGWVDARGGGQFALALRCAQVSERAISAQVGAGIMADSDPQGEFLETEAKLAPIRDCLDFDADCFE

SEQ ID NO: 94297 - protein, 459 aa, Moellerella wisconsensis
  misc_feature (1)..(459): tr|A0A0N0ZB38|A0A0N0ZB38_9GAMM Menaquinone-specific iso chorismate synthase OS=Moellerella wisconsensis ATCC 35 017 OX=1354267 GN=M992_1633 PE=4 SV=1
MSNQSAENIRGKKTATDKINNGNNSVENIITQLLCLLPTLSLAPKEITRLVYSVRPDADFSGLNWLAAQPCFPQFYWATRCGNEESAALGLGKKFNSVQEGEIFLLENPQYPDMRICGLNGWEAIGGSYSSPPEDSAFFFLPRLEWQRDLQGQRLILTLFGEEDIPATEQFLLSLQPAANIHTLNTQIIQQQHHPQHDEWCRLLTLAIAKMQTDPLEKVVMARQTALTLAAPLGVADFLYASQQVNHQCYHFMLAFDKQQGFISSTPERLYLRQGKQLLTEALAGTVASSDDDQIAAKNARWLMEDSKNQHENLVVVDDICQQLQGRVSAVDVSPAEIIRLRKVQHLRRSINAVLFSASDSDCLNRLQPTAAVSGLPRTIARQFVTEHEPFERRWYAGSGGYISSNKSEFAVSLRCAEINGHHIYLYSGAGIVSDSCPEQEWQEIDNKAAGLISLLNNS

SEQ ID NO: 94298 - protein, 1035 aa, Monoraphidium neglectum
  misc_feature (1)..(1035): tr|A0A0D2LX13|A0A0D2LX13_9CHLO Menaquinone-specific iso chorismate synthase (Fragment) OS=Monoraphidium neglect um OX=145388 GN=MNEG_13906 PE=4 SV=1
MAKQEFINGGQQGLDDLLEALGGGNGTAGDSSGSGGDNGAAGDGMRVPRAAGGGGAASGSSSGSRGGGGGAAGEEAIIKLVLARRTAWPLERRMGGVALLEALQERDPRAYQLYLSVPGGGAFVACTPERLYVRSGPHVASEAVAGTRPRGAPGDVEADFYLGLDLLKSPKDHAEFTMTRDWIRAQLSSLPGAEVDIEVSKSVLKLATVQHLYGRIAATLPPTPGVGARGADISLLAALHPTPAVCGRPQGAARAWLAEREGFDRGFYAGPFGWVTGQGAEFVVAIRSALLPEGGDGGGGGGAWRGAAGAADSVDAAQVEACAESSPDARPSTPAPDPLDLRHPTKPSQQQQQQQQQQQQQQQQHCLLAYAGVGVVYGSDPEAEWQELCLKARQFETLLAPRPALAALPNAQLAWAAALVEELCRLGVSTFCVAPGSRSSPLALAAARHPRAQLNVCIDERSLAFWALGFGRASGGPAAVVTSSGTAVANLLPAVVEASLSGVPMLILTADRPFELRDTGANQTIDQVKIFGGYVRWAQDISPPSPAVPGRAIITTADAAVRHCLGLGAPPGPVHLNMQFREPLAPAQLPWDAAAFTAGLSAWQARDAPFTRPVSARGAADGAGTAAGSPAAASHELAEALELLSRAERGLLVVGELQDPEDVAACVRLGQLLGWPVAADVLSGLRIGAVAQQQQQQQQQQQQQAAGGDVSGGGGGGFYLVSHMDHLLLGGQEWWGAVKPDVVLQVGPRLTSKRLNQFLVRGGFAGGPGPRGAAEWSALPEAHPGGTSAAWAYLGPGSDRHDAAHLVTHRMVATPAQLCGILEGHLEARRRQQQQQQQQQQQQQQQQQQQQQELEQHHAERDEREEGEGGWERPPGATMFPEASTSGSGSGPGARRRGGAPKRNGAPPVGAQEGRPRQPPQQQKQQQQQQQPYARLLLQLDAAASAQIDAALSRLDRLSEMHVARQLAAALPAGHGLFLGNSMPIRDMEMYGAPQAPPPPAMATPEAAAPPAGAARGGGAGGGAQGGGTGAGELE

SEQ ID NO: 94299 - protein, 405 aa, Moraxellaceae bacterium
  misc_feature (1)..(405): tr|A0A4Q5VLJ1|A0A4Q5VLJ1_9GAMM Isochorismate synthase O S=Moraxellaceae bacterium OX=1889775 GN=EOO69_07425 PE= 4 SV=1
MMSVQHPWFKNVLHTEQHDLMKSDQPGFVFAASSGVISTRKIIKQLDLIQTEQSDYAQHMQAWVQQCITELAAHKNSNAVLVGGFPFNHDERPELLLAEASNTCLMPRQDDRRHLALFGQTIAASLLPSSEDYKHGVEAILNQIQTSTLKKAVLARAIELRPAQAVNVAQLFNNLLQDNSDGYTFALASNPAQQGWFVGASPELLVAKQNEQVFSHPVAGTLARHPDYHEDQKRAQQLLASVKDHQEHAMVIEAIADQLAPYCHQLQIPKQPSLIKTKTLWHLATPIHGLLKTADTHVLELVELLHPTPAVCGQPPQLARDLISSLEPFQRNLFTGAMGWSDAQGNGVWSVTIRCARVMNDLIRLYAGAGIVAASKPEAELAETAAKFRTMLDALGIEPEQLVYQ

SEQ ID NO: 94300 - protein, 443 aa, Morganella morganii
  misc_feature (1)..(443): tr|A0A422U9L4|A0A422U9L4_MORMO Isochorismate synthase M enF OS=Morganella morganii subsp. morganii OX=180434 GN =menF PE=3 SV=1
MTLFSDFISQVCTEITHNKNKPDGIYQYAVTLSPLLAAVLPPSALTGWLNAQTCWPQFYWQHRDGTETAAVCGEVCRFTHISDAQALLDTLPAQSQIRIWGLNSWQFDTPSPPQGTGGSYLFVPRAELRISGSETHFLVNIDSRRPAEETTEFLRSLVWQTEIPALNITVISARHQPDEAGWTQLVTDAVTAITGGEMEKVVTARKTALELSAPVSPAAFMQASCDCNHRCFHYMLATGPNTAFVASPPERLYFRAGAQLYTEALAGTVANYPEDDRAAQAAQWLLADKKNVHENSVVVDDICQRLQGAVSALDVSAAAVIRLRKVQHLYRVISATLYAPRDSDCLQRLQPTAAVAGLPRSAALAFLRDNEPFDRDWYAGSGGYCSPSRSEFAVSLRCAKISGSRVDLYAGAGIVAGSDPQAEWCEIENKAAGLRTLLESDAH

SEQ ID NO: 94301 - protein, 445 aa, Morganella psychrotolerans
  misc_feature (1)..(445): tr|A0A1B8HR06|A0A1B8HR06_9GAMM Isochorismate synthase M enF OS=Morganella psychrotolerans OX=368603 GN=menF PE= 3 SV=1
MILFSDFISQVCAEITHNKNETNDIYQYAVILPPSLQAALPVTDWPGWLNGQVCYPQFYWQHRDGTDTAAVCGELCRFTHISEAQAVLDTLPEQSNIRIWGLNSWQFDTLSSATPEQGTGGSYLFIPRAELRCVQGNIQFLVNIDSRRPVQETVNFLRSLRGDVIPPVLETTVISAEHQPDKAGWMQLVRGAVTAISGGLMEKVVTARKTVLRLSSPVRPLAFMQASRDCNHHCYHYMLATAPDNAFMASPPERLYLRTGAQLCTEALAGTVAGDPDDARAEAAARWLLADKKNVHENSVVVDDICQRLEGAVNSLKVSDATVIRLRKVQHLYRTISATLYAPRDSDCLQRLQPTAAVAGLPRSAALEFLRKNEPFERNWYAGSGGWCSPSQSEFAVSLRCAQIHGSQIDLYAGAGIVAGSDPQAEWNEIENKAAGLRTLLEGEL

SEQ ID NO: 94302 - protein, 445 aa, Morganella sp.
  misc_feature (1)..(445): tr|A0A3D3HNY7|A0A3D3HNY7_9GAMM Isochorismate synthase M enF OS=Morganella sp. (in: Bacteria) OX=1912315 GN=menF PE=3 SV=1
MILFSDFISQVCAEITHNKNETNGIYQYAVTLPLSLQAALPVTDWPGWLNGQICYPQFYWQHRDGTDTAAVCGELCRFTHINEAQAVLDTLPEQSNIRIWGLNSWQFDAISPTPEQGTGGSYLFIPRAELRCVQGNIQFLVNIDSRRPAEETVTFLRSLRGNVIPPVLETTVISAEHQPDKAGWMRLVREAVTAISGGLMEKVVTARKTVLRLSAPVRPLAFMQASRDCNHHCYHYMLATAPDNAFMASPPERLYLRTGAQLCTEALAGTVAGYPDDARAEAAARWLLADKKNVHENSVVVDDICQRLSGAVNTLKVSDATVIRLRKVQHLYRTISATLYAPRDSDCLQRLQPTAAVAGLPRTAALAFLRKNEPFERNWYAGSGGWCSPSQSEFAVSLRCAQIHGSQIDLYAGAGIVAGSDPQAEWNEIENKAAGLRTLLEGEPH

SEQ ID NO: 94303 - protein, 473 aa, Moritella marina
  misc_feature (1)..(473): tr|A0A5J6WLG3|A0A5J6WLG3_MORMI Isochorismate synthase O S=Moritella marina ATCC 15381 OX=1202962 GN=FR932_09770 PE=4 SV=1
MLNLTAAITSLQQQVIQAQPEQTRISVNLQPLNSTELIEWLGAQVLFPQFYWQSRDGDEEVVALGQCCHCHDVSLAKTLFTQPQRMWGGQSFSRQQSRQKSSSKDTIHRNYYFLPQIELTRQQDHWQLSVNLPVAKQAMLDLGYDKAQLLASLASLIAPAPTPLPQSYKIESRHHYPEFKQWSHLVTKALTAIDDQYFAKVVLARKTVLTLNRPLSATQFLQQSRQVNQQCFHFIFAIYADDYFVGSTPERLFSRDFDNLHTEALAGTAARSLDDTEDRALANWLLNDEKNRYENRLVIDDLLSRLQSRCRTLQVERRPELIQLRKVQHLKHKIDGQLVAGIDDAELLTSLQPTAAIAGLPRRPALDFIADNEPFDRGWYSGALGYIGQQQSEFCVAIRSARVLGHELQLFAGAGIVPGSDPQSEWQELERKTATLLTLLEPDSHGYRDDRMYPNKNNKHVLANQFTPEQQRA

SEQ ID NO: 94304 - protein, 492 aa, Moritella sp.
  misc_feature (1)..(492): tr|A0A2I0FB33|A0A2I0FB33_9GAMM Isochorismate synthase M enF OS=Moritella sp. Urea-trap-13 OX=2058327 GN=menF PE =3 SV=1
MLKLTAAITALQQQVIHAQPEQTRISVDLQPLNSTELIEWLGAQVLFPQFYWQSRDGGEEVVALGQCCHCHDVSLAKTLFTEPQRMWGGQAFSSQESNKESSQSLNNSDRTTRNYYFLPQIELTRQQTHWQLSVNLPANRPAISVAKQSMADAGYDKTQLLASLAELIAPAPIPLPQSYKIESRRHYPEFKQWSHLVTKALTAIDEQYFAKVVLARKTVLTLNRSLSATQFLQQSRQVNQHCFHFIFAIHADDYFVGSTPERLFSRDADNLHTEALAGTAARSLDAAEDRALANWLLNDKKNRYENRLVADDLLSRLQPRCRSLQVEKRPELIKLRKVQHLKHKIAGQLMAGVDDAELLTSLQPTAAIAGLPRQPALDFIADNEPFDRGWYSGALGYIGQQQSEFCVAIRSARVLGRELQLFAGAGIVPGSDPESEWQELERKTATLLTLLEPDANDYRADYGSSTTNNRNTTNSTNKHVLANQFASEQQRA

SEQ ID NO: 94305 - protein, 463 aa, Moritella viscosa
  misc_feature (1)..(463): tr|A0A090IE87|A0A090IE87_9GAMM Isochorismate synthase M enF OS=Moritella viscosa OX=80854 GN=menF PE=3 SV=1
MLILATAIKALQQLIIHAQPEQTRLSVELQPLHATDLIEWFDAQILFPQFYWQSRDCDEEVVALGQCCHFHDLDTAKNQLNEQQRIWGGCAFSHQDYYFLPQIELTRKNSRWQLSVNLPAHSVNVHDGDGDGIKSTQQAYDKAALLESLAHLITPAPTPLPLSYKIEARSHYPEFNQWSHLVTKALNAIEQQDFDKVVLARKTKLTLNRPLSAAQFLQQSRLVNQQCYHFIFALQANDYFVGSTPELLFSRKQRQLDTEALAGTAARSDDAAEDRGLAHWLLHDSKNRYENSLVVGDLMARLDPRCDSLQVSVQPELVKLRKVQHLKHHISGTLTTDVDDAELLANLQPTAAVAGLPRQPALNFIVNNEPFLRGWYSGALGYVGLQQSEFCVAIRSARILGHEVQLFSGAGIVPGSNPVSEWQELERKTATLLTLLEPDSTVNCNMDCDDIRLNAFVPELQRA

SEQ ID NO: 94306 - protein, 466 aa, Moritella yayanosii
  misc_feature (1)..(466): tr|A0A330LPV5|A0A330LPV5_9GAMM Isochorismate synthase M enF OS=Moritella yayanosii OX=69539 GN=menF PE=3 SV=1
MILTTAIKALQQLIIHAQPEQTRLSVELQPLHSTELIEWFDAQVLFPQFYWQSRDGDEEVVALGQCCHFNNINAAKGKFSGPQRIWGGCDFSHQEYYFLPQIELTRNTNSWQLSVNLPADPVLLHKDAGRDSTAQAYDKTVLLESLANLITPAPTPIPLSYKIEARSHYPEFNQWSHLVTKALTAIKQQRFAKVVLARQSILTLNRPLSAAQFLQKSRQVNQHCFHFIFALKPNDYFVGSTPERLFTRTRTQLHTEALAGTAARSDDAREDRALANWLLHDPKNRYENRLVVDDLMSRLGTRCTSLQVSMRPELVKLRKVQHLKHHISGELVAGVDDAELLASLQPTAAIAGLPRQPALDFIAENEPFSRGWYSGALGYVSQHKSEFCVAIRSARIVENELQLFAGAGIVPGSDPMSEWQELERKTATLLTLLEPDSNEHSDTNDHHDHKQKHVLANLFTSEQQRA

SEQ ID NO: 94307 - protein, 428 aa, Motilimonas sp.
  misc_feature (1)..(428): tr|A0A418YHA4|A0A418YHA4_9GAMM Isochorismate synthase M enF OS=Motilimonas sp. PLHSC7-2 OX=2303987 GN=menF PE=3 SV=1
MEILDDLKAILRQLPASDETLMSWHFPIKENNLLAWLHAQTEFPQLYFSDKDDQAETAILGCAWQTNSAEIPPELKDVTLYGGQGFDLRSQWPEFGHCRFILPRLKLTRQGKHVVLTCYLCTLSQDLATEISDCLTLLEKLQQKTPLHWQPPGIASRTDSPSFEQWQQQVNTVCSPAFQQHTAKVVLSRSTELVCHHQVDPFLLLARWQTLNANCFQFLFRWHDGPAFIGCTPERLYLRSGARLTTEALAGTMARGQSSQEDETISQDLLHDPKIHRENQLVLDDILHHLKSVSLDVGIDKIGVLKLNHILHLKQRIHAYLKPEVEDQHLLNALHPTPAVGGTPRQAALDFIAEQEPYSRGWYAGAIGMLSRKQSHFAVAIRSALVAGNTVQLFAGAGIVKGSQPAEEWQELNNKIATVYSLLEPTWR

SEQ ID NO: 94308 - protein, 439 aa, Mumia sp.
  misc_feature (1)..(439): tr|A0A5C4LZZ5|A0A5C4LZZ5_9ACTN Isochorismate synthase O S=Mumia sp. 527 OX=2585212 GN=FHE65_15145 PE=4 SV=1
MTDTVAPLRGPLRLVAQSVPLDEATLDGVPLTHLLPADGGLAWVRDGDGLVAWGEAARLETTGAQRFADAGAWWREVSAHAVVRDKVGVAGSGLVAFGSFAFGDTSGISRGRRAGSSVLVVPSVVVGRRAGTTWVTTIRESALAPTPQISPTDEPVSPEGVAFADGSTSGAQWESIVSEAVRRIAAGDLDKVVLARDLVAELAAPLDARAPVRRLAEAYPNCWTFHVDRLFGATPEMLVRRERGLVTSRVLAGTIRRTGDDTRDLALAGSLARSSKDLEEHEYAVRSVADALEPYCSSMNVPEAPFVLHLPNVMHLATDVAGVVDAGHETASALELAAALHPSAAVGGTPRAEALALIDEIEKLDRGRYAAPVGWIDADGDGEWGIALRSAEYDGARVRLFAGCGIVADSDPEAELAESQAKLVPVRDALAASEDDLPV

SEQ ID NO: 94309 - protein, 424 aa, Muribacter muris
  misc_feature (1)..(424): tr|A0A0J5P2Z2|A0A0J5P2Z2_9PAST Isochorismate synthase M enF OS=Muribacter muris OX=67855 GN=menF PE=3 SV=1
MSIFHQLKQQLSQQIQHLADTAEWSELTAEIALPDETPNVLAWLKGQTHFPQYFWQSRDEDNTLVALGAARRFECLDDAQAFSERYGYRLVGGLTFEKACRFILPRLLFVKNVRKLTAYCYLNGQERQQVSQFLHQIAPMTTLTKTAGSEPLARQQAATFSDWAANIERAIHTIQTSELNKVVLANATTLTFTKPVCPYDLLFASQQKNLGCYHFLWSENGEQTFIGSSPERLYRRQGRYFYTEALAGTAAVTADVEQTECNALWLLNDPKNRYENWLVVDDICSHLTDCAADIQVGEAEIKRLKNVQHLRRFIQTQLADKVKDGDCLARIHPTAAVAGLPRPLATEFIRRHEQFQRGWYAGTLGYFTPENAEFCVALRSALIEKNHITLYAGAGIVEGSKPDDEWQEIERKSLAIANLLTVER

SEQ ID NO: 94310 - protein, 345 aa, Muricauda lutimaris
  misc_feature (1)..(345): tr|A0A3A1N7F1|A0A3A1N7F1_9FLAO Isochorismate synthase O S=Muricauda lutimaris OX=475082 GN=D2V08_16130 PE=4 SV= 1
MQEILDRAKDCYDSGLPFVVYRKPNETDVFGVFQSNDELRSSKDFTEKGFVFAPFNDDNQVVLLQPDEVWEGKYQTEKSEAIKDINLDESGKEVHIELVKKGIQEIETGRLQKVVLSRKIQVRITKPPFKIFKTLLSKYPNAFAYFIHHPKVGTWCGATPETLVKVKDKKLKTMSLAATLPFIEDETPKWGNKEIEEQQMVSEYIGDKLAHTMERLEIDEAESVRAGNLWHLRSEVRGTMLPNLKVSEVVRALHPTPAVCGIPTDEAQKFIHKNENYKRTFYTGFLGELNLRSQGELSLFVNLRCMELQGDTASIFVGGGITEASDPESEWIETQNKSKTMLGIL

SEQ ID NO: 94311 - protein, 342 aa, Muricauda sp.
  misc_feature (1)..(342): tr|A0A4S8RL85|A0A4S8RL85_9FLAO Isochorismate synthase O S=Muricauda sp. SCR12 OX=2530200 GN=EZV76_14615 PE=4 SV =1
MIGRVGDCLKEGLPFCIYRKPNQSQITAVFQLEDALHSVVDFSEKGFVFAPFQFENGAVLLKPDEIFVTQMENSEHSPFGEIQLSEIGRNDHLELIKKGIEEINTGRLSKVVLSRKLEAETKLSPPEIFTQLLQHYPNAFCYLFHHPKIGTWCGATPETLMTIQNREIKTMSLAATLPFVEGEVPQWKEKELEEQQMVSDYIRERLTGLMESLDIEEAKSVRAGNLWHLKSRINGKMLPKTSVNKIVSLLHPTPAVCGIPTQKAKEFILKHENYRRTYYTGFLGELNLNQATETSLYVNLRCMELKGQTASIYVGGGITKASDPEREWVETQNKSKTILHIL

SEQ ID NO: 94312 - protein, 352 aa, Muricauda taeanensis
  misc_feature (1)..(352): tr|A0A3A1NU65|A0A3A1NU65_9FLAO Isochorismate synthase O S=Muricauda taeanensis OX=1005926 GN=D2V93_09405 PE=4 S V=1
MHYPENKELQHLFDNVENQLKKNLPFAIYRKPQQEELVGVFQADNELWSTDFKDKGFVFAPFDLSKGAVLIRPDETVKATHSFLKKLDRAEVALSEEGKKGHMTLVEKGIQEIGKGNLKKVVLSRRMEVSLTKSPLAIFDDLLQQYPNAFCYLFHHPEVGTWCGATPETLVKIKGGELWTMSLAATLPYEGNENPQWGSKEIEEQNMVSDYIREKLHHSMERLEIDEAKSIRAGNLWHLRSEVRGKMRPETDIQKVITTLHPTPAVCGIPTQDAMDFIMGNENYERTFYTGFLGELNLFAQNDISLFVNLRCMELNGDKATIFVGGGITSASNPLDEWIETQNKSKTMLGIL

SEQ ID NO: 94313 - protein, 355 aa, Muriicola sp.
  misc_feature (1)..(355): tr|A0A411E9D3|A0A411E9D3_9FLAO Isochorismate synthase O S=Muriicola sp. MMS17-SY002 OX=2507538 GN=EQY75_07120 P E=4 SV=1
MPSPKNKIQDELLAQLEAHHQNHLPFVIFKYPGASELKAILQSDASLNFTSNFTEPGFVFSPFDDGQRTILLRPDDVLIAKLHNTELPKESSLRQHIEDQKEASRYKKLVADAITAIQQHDLRKVVLSRPIEVATANSAINIFNQLSREYPTAFCYCWYHPKVGCWVGATPEILLKVQGAQFTTVALAGTIEKSGTEKPNWQAKEREEQQLVTQYILEVAADLGIEVNSSEAQTTDAGALWHLKTTLSGKVQPEQIASMIRSLHPTPAVCGIPLKESMYYIEQHEGYPRKFYTGYLGEIKEGSQREIQLFVNLRCMEYREGKAIVYVGGGITRDSDPEKEWQETIAKSRTILKVL

SEQ ID NO: 94314 - protein, 415 aa, Mycetocola lacteus
  misc_feature (1)..(415): tr|A0A3L7AGU2|A0A3L7AGU2_9MICO Isochorismate synthase O S=Mycetocola lacteus OX=76637 GN=D9V34_15710 PE=4 SV=1
MSTPVIPRLHVTTRALADPGTLFGFADRTNPLMWMRDGAGIVGSGVALRLSTAGEDRITDLATQWQQIADTARVRDEVGLPGTGLVAFGTIAFSAVSSAESVLIVPRVIVGRSGEHAWITRVSLEGEPTVDADLLPARTPLGQSLTADLAEDPADAERHRDLVRTALARIQRGDVAKIVLARTVTGQLQADGDRRRLAADLAAAYPQCWTYAVDGMIGASPETLISVRDGSLSLRVLAGTAARGHGATEDRAAAETLIESRKDRDEHAFAVRSALAALAPHAAGLHGQDSPFTLRLPNLWHLATDISGRISDRASVLDLIQALHPTAAVGGTPTLAAIDLINELEPFDRGRYAGPTGWVDAHGNGDWAIALRGAQVDPDGHITAYAGGGIVAGSDPESEFRETGMKFRPIRDALS

SEQ ID NO: 94315 - protein, 418 aa, Mycetocola manganoxydans
  misc_feature (1)..(418): tr|A0A3L6ZLS3|A0A3L6ZLS3_9MICO Isochorismate synthase O S=Mycetocola manganoxydans OX=699879 GN=D9V29_12785 PE= 4 SV=1
MTSPGTLPTATERLVVETQQVDDTRSLLTLVDPQRPLLWLRKGCGLAGIGEALRLEFSGPDRMREAAVVWRDIAAAATVEDPLRMPGTGLVAFGTFAFDDSSAQTSVLLVPQIILGRRDGTSWITRIRLDATASDAPDPLATAFGPTYRLTLTPGAESPAGFQAHVADAVDRILAGDLSKVVLSRDLIGHLPADADLRRIVSDLAVGYPDCWTFAVDGLLGSSPETLVSVQDGSVTARVLAGTASRGADAASDQDAAVNLATSAKDQDEHQFAVQSVLASLRPHTSHVLTSEIPFTLKLPNLWHLATDVEGTLTDNATSLDLIDALHPTAAVAGSPTPAAVALIAELEPFDRGRYAGPVGWVGADGDGEWAIALRCAQVDQDGTVTAYAGGGIVAESVPEKELAETRMKFRPIVDAFG

SEQ ID NO: 94316 - protein, 413 aa, Mycetocola reblochoni
  misc_feature (1)..(413): tr|A0A1R4IXS2|A0A1R4IXS2_9MICO Menaquinone-specific iso chorismate synthase OS=Mycetocola reblochoni REB411 OX= 1255698 GN=FM119_04270 PE=4 SV=1
MSTSAPATLTVETLEHDGTRRLIPLLDARRPLLWQRRDRGLAGVGEVLRLEYSGPTRFADAARDWAAITAAADVTDEVGLPGTGLVAFGTFAFDDSSAERSVLIVPRLIVGTAEGRTWVTRIRLGDAADGSPELQPRAIGPEYRIGFLPGTPGPDGYRAAVAEGVRRIAEGGLDKVVLARQVHGRLPAGADLRRALGDLALSYPECWTFAVDGMLGASPETLVRVVDGRVSTRVLAGSAARGADADADRAAADGLRTSPKNTSEHDFAVRSALAALAPHGEELTTGEGVFALKLPNLWHLATDITGRIGDGSGSLDLLGALHPTAAVAGTPRADALATIHELEGFDRGRFAGPVGWVGAGGEGEWAIALRCAQLGADGAITASAGAGIVAASDPDAELAETRMKLRPIIEAFG

SEQ ID NO: 94317 - protein, 413 aa, Mycetocola tolaasinivorans
  misc_feature (1)..(413): tr|A0A3L7A633|A0A3L7A633_9MICO Isochorismate synthase O S=Mycetocola tolaasinivorans OX=76635 GN=D9V32_09470 PE =4 SV=1
MSSRVIPRLHVTTRALADPGTLFGFASRTDPLIWMRGGAGIVGSGEALRLVHTGEDRITDLAADWQSVAASARVDDDVRLPGTGLIAFGTIAFSAASATESVLIVPRQIVGRSGEHAWITEISIDGEAYPEGAPVRTPLGESVTVPLAEDADADQRHQALVRTALERIARGDVAKVVLARTLTGRLPEGADRRRLAADLAAAYPQCWTYAVDGMIGASPETLISVRAGSLSLRVLAGTAARGHGAEADQAAADTLLESRKDRDEHAYAVRSALAALGPHAAGLHGQDSPFTLRLPNLWHLATDISGRISDRASVLDLIQALHPTAAVGGTPTAAAIDLIDELEPFDRGRYAGPTGWVDAHGNGDWAIALRGAQVDPAGDITAYAGGGIVAGSDPASEFRETGIKFRPIRDALS

SEQ ID NO: 94318 - protein, 410 aa, Mycetocola zhadangensis
  misc_feature (1)..(410): tr|A0A3L7IW07|A0A3L7IW07_9MICO Isochorismate synthase O S=Mycetocola zhadangensis OX=1164595 GN=D9V28_15020 PE= 4 SV=1
MRHLTVSTIQVDDIRSLLPLANPHHPLLWLRQGDGITGLGETLRLEFSGPTRMADAARLWREVAAAADISDEVRMPGSGLVAFGTFAFADSSAKSSVLVIPRMILGRRDGVSWITRITESDSGTEPMASAPSATPFGDEYRISLTPGAESVDGFQAHVAEAVERIVAGNVDKVVLSRDLTGHLPAGADLRRVLADLALGYPNCWTYSVDGLIGSSPETLVTVSNGSVTARVLAGTSSRGRDAESDHRAAVDLQSSTKDQDEHQFAVQSVLDSLRPHTAHVITSEMPFTLKLPNLWHLATDVEGTLTDDASSLDLIDALHPTAAVAGAPTAKAVALIDELEPFDRGRYAGPVGWVGADGDGEWAIALRSAQVEHNGDVTAYAGCGIVAESVPEKELAETRMKFRPILDAFA

SEQ ID NO: 94319 - protein, 371 aa, Mycobacterium attenuatum
  misc_feature (1)..(371): tr|A0A498PU57|A0A498PU57_9MYCO Isochorismate synthase M enF OS=Mycobacterium attenuatum OX=2341086 GN=menF PE=4 SV=1
MASGRLSPVEPPFALCGPGRTLVADGVRAHYCDVRAAQAALRSGSAPMIVGALPFDVNKPAALMVPNQVRRLEALPGWPTGPLPKVHVSAAVPSLVDHRARISNARDQLGALDNPLHKVVLARALRFSADAALDARILLRRLAAADPASYGYLVDLSPAGDTYLGAALVGASPELLVTRAGDRVICQPFAGSAPRAADPEVDAANGAALAGSAKNRHEHQLVIDTMYAVLQPLCDDLEIASEPHLNRTAAVWHLCTPIAGRLRDTSTTAIDLALALHPTPAVGGVPTEAAKELIAALEGDRGFYAGTVGWCDARGDGSWVVSIRCAQLSADRRTAIAHAGGGIVAESDPDDEVAETTTKFTTILTALGVQQ

SEQ ID NO: 94320 - protein, 364 aa, Mycobacterium avium
  misc_feature (1)..(364): tr|A0A0H3A219|A0A0H3A219_MYCA1 Isochorismate synthase D hbC OS=Mycobacterium avium (strain 104) OX=243243 GN=MA V_4163 PE=4 SV=1
MNDEPTFALCGPTQTLVADGVRRSYRDVAAAQAALRSQEVSIVLGALPFDVRRPAALLTPDTVSVSDGPPDWPARKLPSMRVAAALPPPIDYRDRICRAREQLAATDNPLHKVVLARALHLVADAPLDARTILRRLIAADPGAYGYLVDLSAAGHDHAGVALVGASPELLVARTGDRVECRPFAGSAPRAADPDTDAANGAALASSAKNRHEHQLVIETIRAALEPLCDDLSIAAQPQLSRTATVWHLCTPISGRLRDKSTTAIDLALALHPTPAVGGVPTDAAVELIAELEGDRGFYAGAVGWCDARGDGRWVVSIRCAQLSADRRSALARAGGGIVAESDPDDEVAETTTKFATILNALDVR

SEQ ID NO: 94321 - protein, 324 aa, Mycobacterium basiliense
  misc_feature (1)..(324): tr|A0A3S4DRW6|A0A3S4DRW6_9MYCO Isochorismate synthase D hbC OS=Mycobacterium basiliense OX=2094119 GN=dhbC PE=4 SV=1
MLLGALPFDVHRPAALMVPTTVQRMDSLPNWRTDPLPRVRISAAVPPPAQHRARISQAREQLAAADNSLSKVVLARALQLTADAPLDARVIVRRLVAADPTSYGYLVDLSAAGDDYVGATLVGASPELLVARLGDRVTCQPFAGSAPRAANADVDAANAAALAGSAKNRHEHQLVIDALRAALEPLCDDLEIAAEPRLTSTAAVWHLCTPVTARLRDTSTTALDLAVALHPTPAVGGVPTTAATELIAALEGDRGFYAGTVGWCDARGDGDWVVSIRGAHLSADRRTALAHAGGGIVAESNPDDEVDETTTKFATILNALGVEQ

SEQ ID NO: 94322 - protein, 450 aa, Mycobacterium bovis
  misc_feature (1)..(450): sp|Q7TYQ1|MBTI_MYCBO Salicylate synthase OS=Mycobacteri um bovis (strain ATCC BAA-935 / AF2122/97) OX=233413 GN =mbtI PE=3 SV=1
MSELSVATGAVSTASSSIPMPAGVNPADLAAELAAVVTESVDEDYLLYECDGQWVLAAGVQAMVELDSDELRVIRDGVTRRQQWSGRPGAALGEAVDRLLLETDQAFGWVAFEFGVHRYGLQQRLAPHTPLARVFSPRTRIMVSEKEIRLFDAGIRHREAIDRLLATGVREVPQSRSVDVSDDPSGFRRRVAVAVDEIAAGRYHKVILSRCVEVPFAIDFPLTYRLGRRHNTPVRSFLLQLGGIRALGYSPELVTAVRADGVVITEPLAGTRALGRGPAIDRLARDDLESNSKEIVEHAISVRSSLEEITDIAEPGSAAVIDFMTVRERGSVQHLGSTIRARLDPSSDRMAALEALFPAVTASGIPKAAGVEAIFRLDECPRGLYSGAVVMLSADGGLDAALTLRAAYQVGGRTWLRAGAGIIEESEPEREFEETCEKLSTLTPYLVARQ

SEQ ID NO: 94323 - protein, 450 aa, Mycobacterium chimaera
  misc_feature (1)..(450): tr|A0A220YA66|A0A220YA66_9MYCO Salicylate synthase OS=M ycobacterium chimaera OX=222805 GN=BWK49_10300 PE=4 SV= 1
MTEVSVETSSAGSASPSIPLPAHIDPADLAAELAVVLSERVGEEYLLYERSGEWVLATGVHAMIELDSDELRVIRDGVTQRQQWSGRPGPALGEAIDRLLLETDQLFGWIAFEFGVYRYGLQQRLAPETPLARVFWPRGRIVVSREAIRLFDASADHRDVVLAVLGDGVSGLREASAIDVIADTSDYRNRVASAVAEIAAGRYHKVILSRSLEVPFALDFPSTYRLARRHNTPVRSFLLSLGGIRAVGYSPELVAAVRRDGVVVTEPLAGTRALGRGEARDREARDDLESNSKEIVEHAISVRSSLQEMTEIAEPGTAVVTDFMTVRERGSVQHLGSTVSGRLGTSNDRMDALEALFPAVTASGIPKAGGVEAIMRLDEGPRGLYSGAVVMISADGGLDAALTLRAAYERDGRTWLRAGAGIIEESTPEREFEETCEKLSTLAPYLIARP

SEQ ID NO: 94324 - protein, 365 aa, Mycobacterium chubuense
  misc_feature (1)..(365): tr|I4BFZ6|I4BFZ6_MYCCN Isochorismate synthase family pr otein OS=Mycobacterium chubuense (strain NBB4) OX=71042 1 GN=Mycch_1401 PE=4 SV=1
MTREPSFVMAGPEGVVVAEGVQTAFPHIADARAALASHSTPMVVGALPFDVAAPAALLRPQSVRFTDALPAWPLRELAATRIAEMTPDADEHRRRIAAALERLRDPAGGLQKVVLARALRLAADGPLDARTVLHRLAADDVQATKYLVDLSAAGDGYSGAALIGASPELLVARQGLQVTCRPFAGSAPRHRDPDADAASGAALADSAKNRHEHQLVVEALRDALDPLCTDLQVAEHPQLTKTAAVWHLYTPISGRLREKSTTALDLAVALHPTPAVGGSPTDRAVALIDEIEGDRGFYAGTVGWCDQRGDGRWVVSIRCAQLSADRRTAVAHSGGGIVAESDPDDEVDETTTKFKTILSALGVAP

SEQ ID NO: 94325 - protein, 365 aa, Mycobacterium eburneum
  misc_feature (1)..(365): tr|A0A4R5PZC6|A0A4R5PZC6_9MYCO Isochorismate synthase O S=Mycobacterium eburneum OX=2035343 GN=E2F47_12850 PE=4 SV=1
MTSEPPFVLCGPTGALIADGVRNGYPEVAAAQAALASGEAPIVVGALPFDVHSAAALLTPHAVRRADTLPDWPTAPLPAVRVDATVPAPEVHRQRIRHALAQLCAPQATLSKVVLARALRLVADAPLDARSVVSRLVAADRSGYGYLVDLTPAGEPYCGAALVGASPELLVAREGATVTCRPFAGSAPRAADPEIDRANGAALVASGKNRHEHQLVIDTMRDALQPLCTDLRIAATPQLSHTAALWHLSTPITGRLRDTATTALDLALALHPTPAVGGVPTDAAVQLIGALEGDRGFYAGAVGWCDRHGDGRWVVAIRCAQLSADRRTALAHSGGGIVAGSDPDDEVDETTTKFATILNALGVDQ

SEQ ID NO: 94326 - protein, 362 aa, Mycobacterium grossiae
  misc_feature (1)..(362): tr|A0A5C1KQI5|A0A5C1KQI5_9MYCO Isochorismate synthase O S=Mycobacterium grossiae OX=1552759 GN=FZ046_13485 PE=4 SV=1
MMGEPSFVLGGPAGTLIAEGIAAGYPALADARAALAAGEAPMVVGALPFDLTRPAALFRPEHLRFADGPPAASGRPLPRVRVDGAFPAPEVHRARIAEALRRLNDPRTGLHKVVLARALRLVADAPLDAVDVLHLLARDHSASAYFADLTPAGRPGAALIGASPELLVARTGDVVTCRPFAGSAPRSTDPDTDAAHGRALAASAKNRHEHQLVVDQMRTALAPLCRDVTIAARPELSSTSAVWHLSTPITGRLRDTSVTALDLAIALHPTPAVGGVPAGPATDLINELEGDRGFYAGAVGWCDARGDGRWVVAIRCAELSADRRVAEARAGGGIVAESDPDDEVAETGIKFATIMTALGVPQ

SEQ ID NO: 94327 - protein, 377 aa, Mycobacterium innocens
  misc_feature (1)..(377): tr|A0A498PW35|A0A498PW35_9MYCO Isochorismate synthase M enF OS=Mycobacterium innocens OX=2341083 GN=menF PE=4 S V=1
MCARSEGVSRQLSPLEPPFALCGPGRTLVADGVRTRYRDIRAAQAALRSGSAPMILGALPFDVSEPAALMEPTSVQRLEALPGWPTGALSAVHISSAVPPLAEHRARISYARDQLAALDNPLRKVVLARALRLTADAPLDARVILRRLVAADPASYGYLVDLSAAGDDYLGSALVGASPELLVARSGDRVSCQPFAGSAPRAADPEIDAANAAALAGSAKNRHEHQLVIDTMYAALEPVCDDLEIASEPQLTRTAAVWHLCTPITGHLRDTTTTAIDLALALHPTPAVGGVPTSAAGELIAALEGDRGFYAGTVGWCDARGDGRWVVSIRCAQLSADRRTAIAHAGGGIVAESDPDDEVEETTTKFATMLTALGVQQ

SEQ ID NO: 94328 - protein, 450 aa, Mycobacterium intracellulare
  misc_feature (1)..(450): tr|X8CRC7|X8CRC7_MYCIT Salicylate synthase OS=Mycobacte rium intracellulare 1956 OX=1299331 GN=I550_1554 PE=4 S V=1
MTEVSVETSSAGSASPSIPLPAHIDPADLAAELAVVLSERVGEEYLLYERSGEWVLATGVHAMIELDSDELRVIRDGVTQRQQWSGRPGPALGEAIDRLLLETDQLFGWIAFEFGVYRYGLQQRLAPETPLARVFWPRGRIVVSREAIRLFDASADHRDVVLAVLGDGVSGLREASAIDVIADTSDYRNRVASAVAEIAAGRYHKVILSRSLEVPFALDFPSTYRLARRHNTPVRSFLLSLGGIRAVGYSPELVAAVRRDGVVVTEPLAGTRALGRGEARDREARDDLESNSKEIVEHAISVRSSLQEMTEIAEPGTAVVTDFMTVRERGSVQHLGSTVSGRLGTSNDRMDALEALFPAVTASGIPKAGGVEAIMRLDEGPRGLYSGAVVMISADGGLDAALTLRAAYERDGRTWLRAGAGIIEESTPEREFEETCEKLSTLAPYLIARA

SEQ ID NO: 94329 - protein, 366 aa, Mycobacterium kansasii
  misc_feature (1)..(366): tr|X7ZQP3|X7ZQP3_MYCKA Isochorismate synthase family pr otein OS=Mycobacterium kansasii 662 OX=1299326 GN=I545_ 0475 PE=4 SV=1
MSPIEPPFALCGPGRTLVAHGVRARYRDIRAAQAALRSGSVPMIVGALPFDVSEPAALMVPTSVQRLEALPGWPTGPLSPVHISAAIPPLAEHRARISYARDQLAVLDNPLRKVVLARALRLTADAPLDARVILRRLVAADPASYGYLVDLSAAGDDYLGAALVGASPELLVARSGDRVTCQPFAGSAPRAADPEIDAANAAALAGSAKNRYEHQLVIDTMYAALEPLCDHLEIASEPQLTRTAAVWHLCTPITGHLRDTATTAIDLALALHPTPAVGGVPTSAAGELIAALEGDRGFYAGTVGWCDARGDGRWVVSIRCAQLSADRRSAIAHAGGGIVAESDPDDEVAETTTKFTTMLTALGVQQ

SEQ ID NO: 94330 - protein, 324 aa, Mycobacterium liflandii
  misc_feature (1)..(324): tr|L7V4R3|L7V4R3_MYCL1 Isochorismate synthase EntC OS=M ycobacterium liflandii (strain 128FXT) OX=459424 GN=ent C PE=4 SV=1
MLLGALPFDVSQPAALMVPTSVRRETGLPDWPTEAPPRVRISAAVPPLAEHRARITRARDQLAAPQGLLHKVVLARALQLTAETALDPRVVLRRLMAADPTSYGYLVDLTAAGDCYTGAALVGASPELLVARFGDQVTCQPFAGSAPRSADPEIDAANATALAGSAKNRHEHQLVIDTMREALEPLCDELKIAPEPELTGTAAVWHLCTPVIGKLRDTATTAIDLALALHPTPAVGGVPTNAASELIASLEGDRGFYAGTVGWCDAGGDGYWVVSIRCAQLSADRRTALAHAGGGIVAESNPDDEVDETTTKFATILTALGVKQ

SEQ ID NO: 94331 - protein, 324 aa, Mycobacterium marinum
  misc_feature (1)..(324): tr|A0A3E2MY00|A0A3E2MY00_MYCMR Isochorismate synthase D hbC OS=Mycobacterium marinum OX=1781 GN=dhbC PE=4 SV=1
MLLGAFPFDVSRPAALMVPTSVRRETGLPDWPTEAPPRVRISAAVPPLAEHRARITRARDQLAAPQGLLHKVVLARALQLTAETALDARVVLRRLMAADPTSYSYLVDLTAAGDCYTGAALVGASPELLVARFGDQVTCQPFAGSAPRSADPEIDAANATALAGSAKNRHEHQLVIDTMREALEPLCDELKIAPEPELTGTAAVWHLCTPVIGKLRDTATTAIDLALALHPTPAVGGVPTNAASELIAALEGDRGFYAGTVGWCDAGGDGYWVVSIRCAQLSADRRTALAHAGGGIVAESNPDDEVDETTTKFATILTALGVKQ

SEQ ID NO: 94332 - protein, 372 aa, Mycobacterium orygis
  misc_feature (1)..(372): tr|A0A501P465|A0A501P465_9MYCO Isochorismate synthase O S=Mycobacterium orygis OX=1305738 GN=FHI80_05555 PE=4 S V=1
MSAHVATLHPEPPFALCGPRGTLIARGVRTRYCDVRAAQAALRSGTAPILLGALPFDVSRPAALMVPDGVLRARKLPDWPTGPLPKVRVAAALPPPADYLTRIGRARDLLAAFDGPLHKVVLARAVQLTADAPLDARVLLRRLVVADPTAYGYLVDLTSAGNDDTGAALVGASPELLVARSGNRVMCKPFAGSAPRAADPKLDAANAAALASSAKNRHEHQLVVDTMRVALEPLCEDLTIPAQPQLNRTAAVWHLCTAITGRLRNISTTAIDLALALHPTPAVGGVPTKAATELIAELEGDRGFYAGAVGWCDGRGDGHWVVSIRCAQLSADRRAALAHAGGGIVAESDPDDELEETTTKFATILTALGVEQ

SEQ ID NO: 94333 - protein, 365 aa, Mycobacterium paragordonae
  misc_feature (1)..(365): tr|A0A4R5WN69|A0A4R5WN69_9MYCO Isochorismate synthase O S=Mycobacterium paragordonae OX=1389713 GN=EUA02_19935 PE=4 SV=1
MSAEPAFVLTGPRGTLLVDRARDHFPDIASAQAALQTGRAQIVLGALPFDVNGPAALMAPDTLRRLDTLPDWPRDPLPSVRVDAALPPGGEHADRIRRAREQLAAPGNSLRKVVLARALRLAADAPLDGRVVLRRLIDADPTAYGFCADLSAAGAAYTGAALVGASPELLVAKSGDQVVCRPFAGSAPRSADPDIDAANGAALAASEKNRHEHQLVIDTMRAALEPLCDDLTIAAEPQLSRTAAVWHLCTPIVGHLRDTSTSAIDLALALHPTPAVGGVPTEQATELIAELEGDRGFYAGAVGWCDEHGDGYWVVSIRCAELSADRRTALARAGGGIVAESDPDDEVAETTTKFATILKALGVQQ

SEQ ID NO: 94334 - protein, 366 aa, Mycobacterium parascrofulaceum
  misc_feature (1)..(366): tr|D5PD71|D5PD71_9MYCO Isochorismate synthase OS=Mycoba cterium parascrofulaceum ATCC BAA-614 OX=525368 GN=entC PE=4 SV=1
MNDHEPPFALCGPTQTLVADGVRERYRDAAAAQRALRSGASSIVLGALPFDVEWPAALLTPGAVRHTDGPPDWPTGPLPPVRIAAADPPPGQYRDRIRRARDQLAAPDSLLSKVVLSRALRLVADAPLDARVILRRLVAADPAAYGYLVDLTGAGDDYAGVALVGASPELLVARSGDRVTCRPFAGSAPRAADPDVDAANGAALAGSAKDRHEHQLVIETIRAALEPLCDELTIADEPELSRTAAVWHLCTPIGGRLRDTSTTAIDLALALHPTPAVGGVPTKAAVELIAELEGDRGFYAGAVGWCDARGDGRWVVSIRCAQLSADRRTALARSGGGIVAESDPDAEVAETTTKFATILDALDVER

SEQ ID NO: 94335 - protein, 366 aa, Mycobacterium persicum
  misc_feature (1)..(366): tr|A0A1X0LCN3|A0A1X0LCN3_9MYCO Isochorismate synthase M enF OS=Mycobacterium persicum OX=1487726 GN=menF PE=4 S V=1
MSPIEPPFALCGPRRTLVADGVRSHYRDIRAAQAALRSGSVPMILGALPFDVSEPAALMEPTSVQRLDALPGWPTGPLSAVHVSAAVPPLAEHRARISYARDQLAALDNPLRKVVLARALRLTADAPLDARVILRRLVAADPASYGYLVDLSAAGDDYLGVALVGASPELLVARSGNRVTCQPFAGSAPRAADPEIDAANAAALAGSAKNRHEHQLVIDTMCAALEPLCEDLEMASEPQLTRTAAVWHLCTPITGHLRDTATTAIDLALALHPTPAVGGVPTGAAGELIAALEGDRGFYAGAVGWCDAHGDGRWVVSIRCAQLSADRRTAIAHAGGGIVAESDPDDEVEETTTKFATMLTALRVLQ

SEQ ID NO: 94336 - protein, 366 aa, Mycobacterium pseudokansasii
  misc_feature (1)..(366): tr|A0A498QK81|A0A498QK81_9MYCO Isochorismate synthase M enF OS=Mycobacterium pseudokansasii OX=2341080 GN=menF PE=4 SV=1
MSPIEPPFALCGPGRTLVADGVRTRYRDIRAAQAALRSGSVPMILGALPFDLSEPAALMEPTSVQHLDALPGWPTGPLSAVHISVAVPPLVEHRARISYARDQLAALDNPLRKVVLARALRLAADAPLDARVILRRLVAADPASYGYLVDLSAAGDDYLGAALVGASPELLVARSGDRVTCQPFAGSAPRAADPEIDAANAAALAGSAKNRHEHQLVIDTMYAALEPLCDDLKIASEPQLTRTAAVWHLCTPITGHLRETTTTAIDLALALHPTPAVGGVPTSAAGELIAALEGDRGFYAGTVGWCDARGDGTWVVSIRCAQLSADRRTAIAHAGGGIVAGSDPDDEVAETTMKFATILTALGVQQ

SEQ ID NO: 94337 - protein, 377 aa, Mycobacterium simiae
  misc_feature (1)..(377): tr|A0A5B1BVC4|A0A5B1BVC4_MYCSI Isochorismate synthase O S=Mycobacterium simiae OX=1784 GN=F0Q45_04550 PE=4 SV=1
MRTGRARVCRRLRSNEPPFALCGPGGTLVVDGVRARYHDVRAAHAALHSGKAPILLGALPFDVNAPAALMVPDTVQRLETLPGWPTGPLPAVSISAAIPPLAEHRARINHARRRLAAQDNPLRKVVLARTLRLTADAPLDARVILRRLVIADPTSYGYLVDLSAAGADYPGTALVGASPELLVARFGDQVVCQPFAGSAPRAADPQVDAANATALASSAKNRHEHQLVIDAMRAVLAPLCDDLEIASEPQLTRTAAVWHLRTPIRGRLRDTCTTAMDLALALHPTPAVGGVPTVAASELIAALEGDRGFYAGAIGWCDARGDGQWVVSIRCAQLSADRRTALAHAGGGIVAESNPDDEVEETTTKFGTILTALGVKQ

SEQ ID NO: 94338 - protein, 367 aa, Mycobacterium sp.
  misc_feature (1)..(367): tr|A0A557XEU1|A0A557XEU1_9MYCO Isochorismate synthase O S=Mycobacterium sp. 16-83 OX=2592811 GN=FPZ47_22415 PE= 4 SV=1
MSTCSEPPFALSGPRGTLVADGVRDRFCDVRAAQAALRSGSAPIVLGALPFDTDKPAALLAPVGVARTEGPPDWPTGPLPAVRVTAAVPPPADYRDRISRARDRLRAPGGPLHKVVLARALELAADAPLDARVVLRRLIAADPAAYGYLVDLTGAGGDYGGVALVGASPELLVARAGDRVACRPFAGSAPRDADPDRDAANGATLAGSAKNRHEHQLVIDAIRDALEPLCDDLTIAPEPHVSRTAAVWHLCTPISGRLRDTSTTAIDLALALHPTPAVGGVPTRAATELIAEMEGDRGFYAGAVGWCDARGDGTWVVSIRCAQLSADRRTALARAGGGIVAESDPDDEVDETTTKFATILAALGVRS

SEQ ID NO: 94339 - protein, 154 aa, Mycobacterium talmoniae
  misc_feature (1)..(154): tr|A0A2S8BJC2|A0A2S8BJC2_9MYCO Isochorismate synthase M enF OS=Mycobacterium talmoniae OX=1858794 GN=menF PE=4 SV=1
MASGKNRHEHQLVIDTMRDALQPLCTDLRIAATPQLSHTAALWHLSTPITGRLRDTATTALDLALALHPTPAVGGVPTDAAVQLIGALEAIAGSTPVRSGGVTGTGTAAGWWRSAARSCPPIGAPRWRIPAAALSPDPIPTTKSTRPQRNSRRF

SEQ ID NO: 94340 - protein, 450 aa, Mycobacterium tuberculosis; identical to SEQ ID NO: 94322
  misc_feature (1)..(450): sp|P9WFX1|MBTI_MYCTU Salicylate synthase OS=Mycobacteri um tuberculosis (strain ATCC 25618 / H37Rv) OX=83332 GN =mbtI PE=1 SV=1

SEQ ID NO: 94341 - protein, 352 aa, Mycobacterium ulcerans
  misc_feature (1)..(352): tr|X8F2U1|X8F2U1_MYCUL Salicylate synthase OS=Mycobacte rium ulcerans str. Harvey OX=1299332 GN=I551_5926 PE=4 SV=1
MLLETDQVFGWVAFEFGLYRYGLQARLAPGTPLARVFWPRTRIVVTRDDVSLFGAERHEREAVLRLLRDGLPTVPRSRTIDLSADPSGYRDRVAVAVREIASGAYHKVILSRCVEVPFRLDFPSTYRRGRERNTPVRSFLLRLGGIRALGFSPELVTAVSPSGVVVTEPLAGTRALGRGAAHDRLARGDLESNAKEIVEHAISVRTSLHEITEVAEPGTAAVIDFMSVRERGSVQHLGSTISARLDAASDRMNALEALFPAVTASGIPKADGVDAILRLDEGPRGLYSGAVVMLSADGGLDAALTLRAAYERDGRTWLRAGAGIIEASQPEREFEETCEKLFTLAPYLVERQ

SEQ ID NO: 94342 - protein, 365 aa, Mycobacterium xenopi
  misc_feature (1)..(365): tr|A0A2X1V598|A0A2X1V598_MYCXE Isochorismate synthase O S=Mycobacterium xenopi OX=1789 GN=entC PE=4 SV=1
MDSQPPFVLSGPSGVLIADGVERRFSDVFAAQAALRAGHTPIVLGALPFDISQPAALIVPRAVRHAETLPDWPSGPLPAVRVAAAIPSPEQHRTPVQQARNRIAAPGSTLSKVVLARALQLVADAPLDARAILRRLVAADPATYGYLVDLTPGGGRSSGATLVGASPELLVARDGDRITCRPFAGSAPRAADPRLDEAAGAALASSAKNRHEHQLVVDSMRAALQPLCDDLTIAPSPQLRRTATVWHLSTPISGRLRDSSTTAIDLALALHPTPAVGGVPTKQACELITTLEGDRGFYAGAVGWCDGRGDGRWVVSIRGAQLSADRRGVLAHAGGGIVAESDPDDEVDETTTKFATILAALGVQH

SEQ ID NO: 94343 - protein, 281 aa, Mycobacteroides abscessus
  misc_feature (1)..(281): tr|A0A1N4ZE23|A0A1N4ZE23_9MYCO Probable isochorismate s ynthase EntC OS=Mycobacteroides abscessus subsp. absces sus OX=1185650 GN=dhbC_1 PE=4 SV=1
  misc_feature (2)..(2): Xaa can be any naturally occurring amino acid
MXPAPSEHLRRVTEAVEVLRSDAGLAKVVLARVLELRAESPVDPLVLTHRLIRNDPDANSFCVDLSPAGDRFRGHTMVGCSPELLVERRGDMVICHPFAGSAPRSNDPSQDRRTGEDLAGSHKNRHEHSVVIDQLREDLASLCVDVQVPPEPTLSRTAALWHLSTSISARLRQSSTTALDLALALHPTPAVCGTPTEAAADLIARIEGDRGFYAGAIGWCDRNGDGRWVVTIRCAELSADGTAIRAYAGGGLVAESDPQDELSETTVKFRTVLAALGAKID

SEQ ID NO: 94344 - protein, 369 aa, Mycobacteroides chelonae
  misc_feature (1)..(369): tr|A0A4Y6IQJ4|A0A4Y6IQJ4_MYCCH Isochorismate synthase O S=Mycobacteroides chelonae OX=1774 GN=FJK96_18540 PE=4 SV=1
MTATDSPAYPHFVMSRAADALYAYGRERAYDDVASAAEALRAGRHRMLVGALPFDTSRPAALTVPATVERGQPHEFYGTMPNIHVTHQVPEPSEHLRRVTEAVEVLRDTAGGLSKVVLARVLELQADAPVDALVLTHRLIRNDPDANSFCVDLSPAGERFRGHTMVGCSPELLVERHGDMVICHPFAGSAPRSSDPSQDRRTGEDLAGSHKNRHEHSVVIDQLREDLSSLCVDVQVPPEPTLSRTAALWHLSTSISARLRQSSTTALDLAMALHPTPAVCGTPTEAAADLIARIEGDRGFYAGAVGWCDSSGDGRWAVSIRCAELSADGTAIRAYAGGGLVAESDPQDELSETTVKFRTILAGLGAQSE

SEQ ID NO: 94345 - protein, 369 aa, Mycobacteroides franklinii
  misc_feature (1)..(369): tr|A0A4R8R2F6|A0A4R8R2F6_9MYCO Isochorismate synthase O S=Mycobacteroides franklinii OX=948102 GN=dhbC PE=4 SV= 1
MTATNSPAHPHFVMSRATDALYAYGRDTTYDDVSNAAEALRSGRHHMLVGALPFDTTEPAALTVPVTVQRGQPQEFYGTMPNIHVTQQIPEPSEHLRRVTEAVEVLRDSRAGLSKVVLARVLELRADAPVDPLVLTHRLIRNDPDANSFCVDLSPAGDRFRGHTMVGCSPELLVERRGDMVICHPFAGSAPRSKDPSLDRRTGEDLAGSHKNRHEHSVVIDQLREDLASLCVDVQVPPEPTLSRTAALWHLSTAISARLRQSSTTALDLALALHPTPAVCGTPTKGAADLIARIEGDRGFYAGAVGWCDGNGDGRWAVSIRCAELSADRTAIRAYAGGGLVAESDPQDELSETTVKFRTVLAGLGAEIE

SEQ ID NO: 94346 - protein, 380 aa, Mycobacteroides salmoniphilum
  misc_feature (1)..(380): tr|A0A4R8SF80|A0A4R8SF80_9MYCO Isochorismate synthase D hbC OS=Mycobacteroides salmoniphilum OX=404941 GN=dhbC PE=4 SV=1
MTATDSPVHPHFVMSRAAEALYAYGRETAYDDIASAADALRTGRHHMLVGALPFDTSKPAALTVPATVERGQPQEFYGTMPNIRVTQQIPEPSEHLRRVTEAVEVLRDTASGLSKVVLARVLEMQADTPVDALVLTHRLIRNDPDANSFCVDLSPAGDRFRGHTMVGCSPELLVERRGDMVICHPFAGSAPRSSDPSLDRRTGEDLAGSHKNRHEHSVVIDQLREDLASLCVDVQVPPEPTLSRTAALWHLSTSISARLRQSSTTALDLAVALHPTPAVCGTPTEAAANLIARIEGDRGFYAGAVGWCDSSGDGRWAVSIRCAELSADGTAIRAYAGGGLVAESDPQDELSETTVKFRTILAGLGAELDEPLGRRESNSE

SEQ ID NO: 94347 - protein, 373 aa, Mycolicibacter arupensis
  misc_feature (1)..(373): tr|A0A5C7Y2N0|A0A5C7Y2N0_9MYCO Isochorismate synthase O S=Mycolicibacter arupensis OX=342002 GN=E6Q54_11660 PE= 4 SV=1
MRPSSAAFVLSGSSGTLSAEAAVAGFPDVAEAQAALTAGRAPIVVGALPFRPGAAAALFVPRGLRREQALPPVPTVALPEVRVVGQVPTPEEHRARIQRVLEELNAPHSALHKVVLARGLRLSADAPLNGDALLRRLIAADPSSYGYLVDLSAAGDPYTGTVLVGASPELLVARDGDRVTCRPFAGSAPRSADAEIDAANGAALAASGKNRHEHQLVVDQLRAALAPLCTELDVAPEPLLSSTAAVWHLNTPITGRLRDTATTALDLALALHPTAAVGGVPTAAAVDLITEVEDDRGFYAGAVGWCDAAGDGRWVVAIRCAQLSADRRSALAHAGGGIVAESDPDEELAETVTKFGTILSAMGVGRPTAAPPD

SEQ ID NO: 94348 - protein, 365 aa, Mycolicibacter terrae
  misc_feature (1)..(365): tr|A0A240AQI4|A0A240AQI4_9MYCO Isochorismate synthase E ntC OS=Mycolicibacter terrae OX=1788 GN=entC PE=4 SV=1
MLSGPAGTLVADGIATGFCDVGAAQTALTSGEAPIVVGALPFRPGGAAALFVPSAVRHDMALATRPDAALPAVRVVAQLPEPDEHRARIRRALHELTAAPGALHKVVLARGLRLAADAPLDPGTVLRRLVAADPSGYGYLVDLSAAGDGYAGAALVGASPELLVARDGDRVTCRPFAGSAPRSPDPAADAANGAALADSGKNRHEHQLVVDQLRAALEPLCTDLDIAPAPRLTGTAAVWHLSTPITGRLRDTATTALDLALALHPTAAVGGFPTAAALELIAELEGDRGFYAGAVGWCNADGDGAWVVSIRCAQLSADRRSALAHAGGGIVAESDPDEELAETVTKFSTILSALGVAPPSAPPRD

SEQ ID NO: 94349 - protein, 364 aa, Mycolicibacterium aichiense
  misc_feature (1)..(364): tr|A0A378RB00|A0A378RB00_9MYCO Isochorismate synthase D hbC OS=Mycolicibacterium aichiense OX=1799 GN=dhbC PE=4 SV=1
MTLPSFVLSGPAGTVVAEGIRTGYDDVAAAAAALADGSADVVVGALPFDIRSRAALMTPMTVTFGDALPSWSTAPLPAVRIEAMVPAPAEHRARIRAALDRLSAPESALQKVVLARALRLVADGPLDARAILDRLVAADPEACAYLADLSVAGGDHTGTALVGASPELLVARSGEVVTCQPFAGSAPRSPDPQADAANGAALSESGKNRHEHQLVVDTMRAALEPLCVDLEIAPQPQLSRTAALWHLSTPIRGRLRDTATTAIDLALALHPTPAVGGVPTAAAVDLIAQLEGDRGFYAGAVGWCDARGDGRWVVAIRGAQLSADRWGALAQAGGGIVAESDADDEVAETTTKFRTILSALGVQK

SEQ ID NO: 94350 - protein, 365 aa, Mycolicibacterium aurum
  misc_feature (1)..(365): tr|A0A3S4RK54|A0A3S4RK54_MYCAU Isochorismate synthase O S=Mycolicibacterium aurum OX=1791 GN=dhbC PE=4 SV=1
MTREPTFVLAGPDDVVVADGVHTAFPHIADARAALASHSAPIILGALPFDVNQPAALIRPQSVRFSDVLPQWPLRELAPAQITETTPDADEHRRRIGLALARLRDPADDLHKVVLARALQLSADGRLDARTVLHRLAADDAQATKYLVDLSAAGDGYSGTVLVGASPELLVARRGSQVMCRPFAGSAPRLADPDADAASGAALAASEKNRHEHQLVVDALRTALEPLCTDLQFAERPELSKTAAVWHLATPISGRLREKSTTALDLAVALHPTPAVGGSPTDQAVALIGELERDRGFYAGTVGWCDQRGDGRWVVSIRCAQLSADRRTATAHSGGGIVAESDPDDEVDETTTKFRTILSALGVKQ

SEQ ID NO: 94351 - protein, 365 aa, Mycolicibacterium chitae
  misc_feature (1)..(365): tr|A0A448I9P8|A0A448I9P8_MYCCI Isochorismate synthase D hbC OS=Mycolicibacterium chitae OX=1792 GN=dhbC PE=4 SV =1
MTAPPPSFVLSGPSGTVLSRGVRAAFDSVAAATTALDRGEVPIVVGALPFDVASPAALHAPEQLHRGPLTAPAGGRLPRVTEVSPQPDLATHRDRVATAVARLRAPGTDLHKVVLARSLRLHADGPWDPTTVLHRLLDADPGAYGYLVDLSPAGGAHAGTVLVGASPELLVARSGDRVTCRPFAGSAPRSADPEIDRANSTALAESAKNRHEHQLVIDVMRAALEPLCVDLDIAAEPQLHHTDALWHLNTPISATLRESSTTAIDLALALQPTPAVGGVPTAAATALIGEIEGDRGFYAGAAGWCDARGDGRWVVSIRCAQLSADRRSALAHSGGGIVAESDPDDEVAETTTKFRTILSGLGVTL

SEQ ID NO: 94352 - protein, 366 aa, Mycolicibacterium chlorophenolicum
  misc_feature (1)..(366): tr|A0A0J6VTC0|A0A0J6VTC0_9MYCO Isochorismate synthase D hbC OS=Mycolicibacterium chlorophenolicum OX=37916 GN=d hbC PE=4 SV=1
MTREPTFVLAGPDGVITAEGVHTAFPRIADARAALASHSAPIIVGALPFDLTAPAALIRPQTVRFTDTLPSWPLRELATTRITETTPDADEHRRRIAVALQRLRDTDSGLHKVVLARALRISADGPLDARTVLHRLAGADAQATKYLVDLSAAGDGYSGTALVGASPELLVARNGLQVTCRPFAGSAPRRADPDGDAASGAALADSAKNRHEHQLVVDALREALDPLCTDVQIADQPQLTRTAAVWHLYTPITGRLREKTTTALDLALALHPTPAVGGSPTTAATALISELEGDRGFYAGTVGWCDQRGDGRWVVSIRCAQLSADRRSALAHSGGGIVAESEPDDELDETTTKFRTILSALGVPDD

SEQ ID NO: 94353 - protein, 366 aa, Mycolicibacterium chubuense
  misc_feature (1)..(366): tr|A0A0J6WQZ8|A0A0J6WQZ8_MYCCU Isochorismate synthase D hbC OS=Mycolicibacterium chubuense OX=1800 GN=dhbC PE=4 SV=1
MTREPTFVLAGPDGVITAEGVHTAFPRIADARAALASHSAPIIVGALPFDLTAPAALIRPQTVRFTDTLPSWPLRELGTTRITETTPDADEHRRRIAVALQRLRDADSGLHKVVLARALRISADGPLDARTVLHRLAGADAQATKYLVDLSAAGDGYSGTALVGASPELLVARNGLQVTCRPFAGSAPRRADPDEDAASGAALADSAKNRHEHQLVVDALREALDPLCTDVQIADRPQLTRTAAVWHLYTPITGRLREKATTALDLALALHPTPAVGGSPTTAATALISELEGDRGFYAGTVGWCDQRGDGRWVVSIRCAQLSADRRSALAHSGGGIVAESEPDDELDETTTKFRTILSALGVPDD

SEQ ID NO: 94354 - protein, 364 aa, Mycolicibacterium flavescens
  misc_feature (1)..(364): tr|A0A3S5EHU7|A0A3S5EHU7_MYCFV Isochorismate synthase f amily protein OS=Mycolicibacterium flavescens OX=1776 G N=dhbC PE=4 SV=1
MTREPSFVLASRGAVVAEGVHTAFPKVAEARAALASHSAPIIVGALPFDMTKPAALIRPQSVQFLDALPDWPLRPMPGVQIAEALPDPDEHRARVASAVDRLNSPSSGLHKVVLARALRLAADGPLDARTVLHRLVGADPAANGYLADLTAAGGGYSGSVLVGASPELLVARRGDQVVCAPFAGSAPRSPDPDTDEANGAALAASAKNLREHQFVVDTIRDALEPLCADLEVAAEPALRKTDSVWHLATRITGTLRERSITALDLAIALHPTPAVGGVPTADAADLIAELEGDRGFYAGAVGWCDQRGDGRWVVSIRCAALSADRRTAEAYSGGGIVAESDPDDELAETTTKFTTILAALGAAT

SEQ ID NO: 94355 - protein, 322 aa, Mycolicibacterium fortuitum
  misc_feature (1)..(322): tr|A0A378U668|A0A378U668_MYCFO Isochorismate synthase O S=Mycolicibacterium fortuitum OX=1766 GN=entC PE=4 SV=1
MLGALPFNPAAAAALYEPDTVRFTGSLPDWTASPPPAVVDRQTLPPGSVHRERVAEAIRQLRDPLVPIDKVVLARALRLTASSAWDVRSVLRRLADADPAATVYLADLTPAGDTYTGTALVGASPELLVAREGEMVICRPFAGSAPRSDDPAVDAANATALAASAKNRHEHQLVVDVMRQALEPLCADLQIADEPELHGTDALWHLSTPVVGRLREKRTTAIDLALALHPTPAVGGVPADRAAALIGELEGDRGFYAGAVGWCDSSGDGRWVVSIRCAVLSADRYTALASAGGGIVAESDPDDEVDETTTKFRTILTGLGAT

SEQ ID NO: 94356 - protein, 365 aa, Mycolicibacterium gilvum
  misc_feature (1)..(365): tr|A0A378SIB0|A0A378SIB0_9MYCO Isochorismate synthase O S=Mycolicibacterium gilvum OX=1804 GN=dhbC PE=4 SV=1
MTREPTFVFAGPDGVVVGEGVHTAFPHIADARAALASHSSPIVVGALPFDLSRPAALMRPQSVRFTDVMPEGPGRELASTEITETSPDADEHRRRIGVALARLRDPADPLDKVVLARALLLTAQGRLDARTVLDRLASADAQATKYLVDLSAAGEGYSGTALVGASPELLVARHGRQVLCRPFAGSAPRRPDPEDDAASGAALVESDKNRHEHQLVVDALRAALEPLCTDLQIAPRPQLTRTAAVWHLYTPITATLRERSTTALDLAVALHPTPAVGGSPTDRAVALIDELEGDRGFYAGAVGWCDQRGDGRWVVSIRCAQLSADRHTALAHSGGGIVAESDPGAELDETTTKFRTILSALGVES

SEQ ID NO: 94357 - protein, 365 aa, Mycolicibacterium hassiacum
  misc_feature (1)..(365): tr|K5BKB8|K5BKB8_MYCHD Isochorismate synthase MenF OS=M ycolicibacterium hassiacum (strain DSM 44199 / CIP 1052 18 / JCM 12690 / 3849) OX=1122247 GN=dhbC PE=4 SV=1
MTREPSFILATDGGAVVADGIHTAFPVVADAKAALASHSAPIIVGALPFDLTAPAALIRPQSIRFLDALPTWPLRPLPEVTIAEARPETDEHRARISRALRRLRDPDDALQKVVLARTLRLVADGHLDARTVLHRLAGADPTANAFLADLTAAGAAYSGTALVGASPELLVARRGDRVLCAPFAGSAPRHADPETDAASGARLAASAKNRHEHRLVVEAIREALEPVCSELQIAPEPRLDKTAAVWHLYTPITAQLREKSITALDLALRMHPTPAVGGVPAAPAAELIAELEGDRGFYAGAVGWCDRRGDGRWVVSIRCAQLSADRRSALAYSGGGIVADSDPEDELAETTTKFATILTAMGVPT

SEQ ID NO: 94358 - protein, 364 aa, Mycolicibacterium hodleri
  misc_feature (1)..(364): tr|A0A502EAF6|A0A502EAF6_9MYCO Isochorismate synthase O S=Mycolicibacterium hodleri OX=49897 GN=EAH80_13220 PE= 4 SV=1
MTVEPSFVLAGHDGVVVAEGVVSAYPRLSDAQAALASGEAPIILGALPFDVTRPTALMRPEHVRFTETLPDWSPKNMPAVHIAETVPAPAEHRARIAAALERLRDPDSPLHKVVLARALRLVADGTLDVGTILHRMAEDHSATTYFVDLSAAGGEHAGTALIGASPELLVARRGDLLSCKPFAGSAARSTDFAVDRANGAALANSTKNLHEHQLVVDQMRAALQPLCVDLDIASTPELSNTSAVWHLSTPITGRLRDSSTTALDLAVALHPTAAVGGVPTREAVDLIGTLEGDRGFYAGAVGWCDASGDGMWVVSIRCAELSADRRTAEARSGGGIVAESDPDDEVAETNTKFRTILTALGVST

SEQ ID NO: 94359 - protein, 362 aa, Mycolicibacterium mageritense
  misc_feature (1)..(362): tr|A0A5C7Y9Z3|A0A5C7Y9Z3_9MYCO Isochorismate synthase O S=Mycolicibacterium mageritense OX=53462 GN=E6Q55_23340 PE=4 SV=1
MTPSFVLAGPAGAVIADGVRTAFSRISDAQAALRSGNAPIILGALPFDLTSAAALYEPDAFTHAGALPDWPAGTPPTVLSRETLPPSTVHRDRVAEAVRRLRDPAAGLDKVVLARALRLVADAPWDTRAVLRRLADADRAATVYLADLSASGDPRVGTVLVGASPELLVARHGDMVICQPFAGSAPRSADPEVDRANAMALAASGKNRHEHELVVDVMREALDPMCAELQIAVEPELHGTDALWHLSTPIRGRLRDKHTTAIDLALALHPTPAVGGVPAAAAATVIRELEGDRGFYAGAVGWCDAAGDGRWVVSIRCAQLSADRCTALAHAGGGIVAESDPDDELDETTTKFRTILTGLGAA

SEQ ID NO: 94360 - protein, 365 aa, Mycolicibacterium moriokaense
  misc_feature (1)..(365): tr|A0A370CXL5|A0A370CXL5_9MYCO Isochorismate synthase O S=Mycolicibacterium moriokaense OX=39691 GN=DVS77_14650 PE=4 SV=1
MTREPTFVLATGGSAVVAEGVHTAYKSVADARTSLTSHSAPIIVGALPFDISRPAALIRPQDVQFLDALPKWPLRDLPAVRVAEMLPEPDEHRARVAAAVARLRDPASGLHKVVLARALRLVADGPLDARTIVDRLVAADPAAYAYLADLTAAGTEHSGTVLVGASPELLVARHGERVMCAPFAGSAPRLADPDADHASGEALAASAKNRHEHELVVDAMRKALDPLCVDLQIPTTPQLSRTAAVWHLSTPITGRIREKATTALDLALALHPTPAVGGAPAGAAADLIGEIEGDRGFYAGAVGWCDQRGDGRWVVSIRGAQLSADRRTALAHAGGGIVAESDPDDEVTETTTKFTTILSALEAQP

SEQ ID NO: 94361 - protein, 361 aa, Mycolicibacterium mucogenicum
  misc_feature (1)..(361): tr|A0A4R5WGK5|A0A4R5WGK5_9MYCO Isochorismate synthase O S=Mycolicibacterium mucogenicum OX=56689 GN=EUA03_13330 PE=4 SV=1
MTRVFVLAGPDGVMLADGPARAFPDLADARRALAAGEVPILVGALPFDLDSPAALMAPASVTHADALPFTADRLPAVRIAASLPSPDEHRARVAAAVRALRDPAAGLHKVVLARALELVADDVLDPYVVLSRLADDHSATAFFTDLSAAGAPYSGTALLGASPELLVARRGDVVTCKPFAGSAPRSADPETDAANGAALAASAKNRHEHQLVVDIMREALEPLCSELDIAAEPQVSATTAVWHLSTPIVGRLRETSTTALDLAIALHPTPAVGGVPTQAAARLIHELEGDRGFYAGAVGWCDSAGDGRWVVSIRCGQLSADRLSIDARAGGGIVAESDPDDEVTETTTKFRTMLTALGVPV

SEQ ID NO: 94362 - protein, 366 aa, Mycolicibacterium obuense
  misc_feature (1)..(366): tr|A0A0J6WF42|A0A0J6WF42_9MYCO Isochorismate synthase D hbC OS=Mycolicibacterium obuense OX=1807 GN=dhbC PE=4 S V=1
MTREPTFVLAGPGEVVVADGVHTAFPRIADARAALASHSAPMIVGAVPFDLSQPAALIRPQTIRFTPDLPSWPLRELPATRITATTPDGAEHRRRVALAVARLADPATALHKVVLARAVTVTADGPLDARTLLHRLAGNDAQATKFLVDLSAAGEGHSGTALIGASPELLVARRGQQVTCRPFAGSAPRLADPDADAKSGAALADSAKNRHEHRLVVDALREALAPLCTDLQIAEQPQLTKTAAVWHLYTPISGRLRQASTTALDLAVALHPTPAVGGSPTAAATELITELEGDRGFYAGAVGWCDQRGDGCWVVSIRCAQLSADRRSAVAHSGGGIVAESDPDDELAETTTKFKTILAALGVRDD

SEQ ID NO: 94363 - protein, 450 aa, Mycolicibacterium paratuberculosis
  misc_feature (1)..(450): sp|Q73XV3|MBTI_MYCPA Salicylate synthase OS=Mycolicibac terium paratuberculosis (strain ATCC BAA-968 / K-10) OX =262316 GN=mbtI PE=3 SV=1
MTEVSVETTSAGSESPSIPLPVHIDPADLAAELAVVLSERAGEEYLLYERGGEWVLATGVRAMIELDSDELRVIRDGVTQRQHWSGRPGPVLGEAIDRLLLETDQLFGWIAFEFGVYRYGLQQRLAPGTALARVFWPNGRIVVTREAIQLFGTSTGRRDDVLGVLGDGVPGLRDASAVDVVTDPSNYRDRVASAVAEIAAGRYHKVILSRCLQVPFAVDFPSTYRLARRHNTPVRSFLLRLGGIRAVGYSPELVAAVRHDGVVVTEPLAGTRAFGRGALHDRQARDDLESNSKEIVEHAISVRSSLQEMAEIAEPGTAVVTDFMTVRERGSVQHLGSTVSGRLGTSNDRMDALEALFPAVTASGIPKAGGVEAILRLDEGPRGLYSGAVVMVSADGALDAALTLRAAYEHDGKTWLRAGAGIIEESTPEREFEETCEKLSTLAPYLIARQ

SEQ ID NO: 94364 - protein, 361 aa, Mycolicibacterium peregrinum
  misc_feature (1)..(361): tr|A0A4Z0HN25|A0A4Z0HN25_MYCPR Isochorismate synthase O S=Mycolicibacterium peregrinum OX=43304 GN=EJD94_20300 PE=4 SV=1
MNPSFVLAGPNGAVLAEGVRTGFADIADAQAALRSGTPIVLGALPFDPATPAALYEPDAVRFTDALPDWPVNPPPAAVERETVPPGSVHRERVAEAIRRLRDPQIPIDKVVLARSLRLSADSAWDVRTVLRRLADADPAATVYLADLSPAGGANAGTALVGASPELLVAREGETVICQPFAGSAPRSADPAVDAANATALAASAKNRHEHQLVVDVMRQALEPLCVDLQIAEEPQLHGTDALWHLSTPVVGRLREKRTTAIDLALALHPTPAVGGVPTDRAAALISELEGDRGFYAGAVGWCDSSGDGRWVVSIRCAVLSADRYTALASAGGGIVAESDPDDEVDETTTKFRTILTGLGAT

SEQ ID NO: 94365 - protein, 369 aa, Mycolicibacterium phlei
  misc_feature (1)..(369): tr|A0A3S4V0Q0|A0A3S4V0Q0_MYCPH Isochorismate synthase E ntC OS=Mycolicibacterium phlei OX=1771 GN=dhbC PE=4 SV= 1
MTATDSPAYPHFVMSRAADALYAYGRERAYDDVASAAEALRAGRHRMLVGALPFDTSRPAALTVPATVERGQPHEFYGTMPNIHVTHQIPEPSEHLRRVTEAVEVLRDTAGGLSKVVLARVLELQADAPVDALVLTHRLIRNDPDANSFCVDLSPAGERFRGHTMVGCSPELLVERRGDMVICHPFAGSAPRSSNPSQDRRTGENLAGSHKNRHEHSVVIDQLRADLSSLCVDVQVPPEPTLSRTAALWHLSTSISARLRQSSTTALDLAMALHPTPAVCGTPTEAAADLIARIEGDRGFYAGAVGWCDNSGDGRWAVSIRCAELSADGTAIRAYAGGGLVAESDPQDELSETTVKFRTILAGLGAHSE

SEQ ID NO: 94366 - protein, 363 aa, Mycolicibacterium rhodesiae
  misc_feature (1)..(363): tr|G4HVP0|G4HVP0_MYCRH Isochorismate synthase OS=Mycoli cibacterium rhodesiae JS60 OX=931627 GN=MycrhDRAFT_1109 PE=4 SV=1
MAQPSFVLSGPAGTVVADGIQTGYDDVAAAATALADGSADVVVGALPFDIRGKAALLSPTSVTFTDKLPAWPTAAPAPVRIAEALPSPEEHRARIRTALGRLTDPESGLQKVVLARALRLVADDPLDERAILQQLAADAEATAYLADLSPAGGDYTGCVLVGASPELLVARSGDLVTCQPFAGSAPRSADPQTDAANGAALAESGKNRHEHQLVVDTMRAALTPLCAELDVAAHPQLSHTAALWHLSTPIRGRLRDTAITAIDLALALHPTPAVGGVPTQDAVDLIAELEGDRGFYAGAVGWCDARGDGRWVVAIRGAQLSADRREALAQAGGGIVAESDADDEVAETTTKFRTILSALGVQQ

SEQ ID NO: 94367 - protein, 361 aa, Mycolicibacterium senegalense
  misc_feature (1)..(361): tr|A0A378W1Z3|A0A378W1Z3_9MYCO Isochorismate synthase O S=Mycolicibacterium senegalense OX=1796 GN=entC PE=4 SV =1
MNPSFVLAGPTGTVLGEGMRTGFADIADAQAALRHGTPIVLGALPFDLRAPVALFEPETVQVADALPLWNPSPLPSVLQRETLPPGPVHRERVAEAISRLRDPHDPIDKVVLARALRLTADSPWDVRGVLRRLAEADPAATVYLADLSAAGAAHTGTALVGASPELLVAREGERVICQPFAGSAPRSADPRTDAANAAALAASAKNRHEHQLVVDMMRRALEPLCVELQIADEPELHGTDALWHLSTPVIGRLREKHTTAIDLALALHPTPAVGGVPTDRATELISELEGDRGFYAGAVGWCDSRGDGRWVVSIRCAVLSADRYTALASAGGGIVAESDPDDEVDETTTKFRTILTGLGAT

SEQ ID NO: 94368 - protein, 367 aa, Mycolicibacterium smegmatis
  misc_feature (1)..(367): tr|I7G5C0|I7G5C0_MYCS2 Isochorismate synthase OS=Mycoli cibacterium smegmatis (strain ATCC 700084 / mc(2)155) O X=246196 GN=entC PE=4 SV=1
MSAPVSAPSFVFAGPSGVLIGEGVQTGFATIAGARAALTSGAADLVVGALPFDLTGPAALHAPASARVAGALPDWPTGTPPVLRTRETLPSGDVHRERVAEAVRRLRDADTPLDKVVLARALRLTAEAPWDPRTVLRRLADADPAATVYLADLSPAGDPHTGTVLVGASPELLVARDGDEVICRPFAGSAPRSADLETDRANAAALAASGKNRHEHELVVDVMRKALDPLCVDLQIAAQPELHATDALWHLSTPIRGRLRDKAITAIDLAVALHPTPAVGGVPTDLAASLITELEGDRGFYAGAVGWCDSAGNGRWVVSIRCAVLSADRRVALANAGGGIVAESDPDDEVDETTTKFRTILTGLGVQ

SEQ ID NO: 94369 - protein, 348 aa, Mycolicibacterium sp.
  misc_feature (1)..(348): tr|A0A3S0SJH9|A0A3S0SJH9_9MYCO Isochorismate synthase O S=Mycolicibacterium sp. OX=2320850 GN=EKK51_15870 PE=4 SV=1
MLADGPARPFPDLDEARRALAAGEVPILLGALPFDLDSPAALMAPDSVTYADALPFTADRLPAVRIAASLPSPDEHRARVAAAVRALRDPAAGLHKVVLARALELVADDVLDPYAVLSRLADDHSATAFFTDLSAAGAPYSGTALLGASPELLVARRGDVVTCKPFAGSAPRSADPETDAANGAALAASAKNRHEHQLVVDIMREALEPLCSELDIATEPQVSATTAVWHLSTPIVGRLRETSTTALDLAIALHPTPAVGGVPTEAAARLINELEGDRGFYAGAVGWCDGAGDGRWVVSIRCGQLAADRRSVDARAGGGIVAESDPDDEVTETTTKFRTMLTALGVPV

SEQ ID NO: 94370 - protein, 369 aa, Mycolicibacterium tokaiense
  misc_feature (1)..(369): tr|A0A378TA63|A0A378TA63_9MYCO Isochorismate synthase O S=Mycolicibacterium tokaiense OX=39695 GN=entC PE=4 SV= 1
MTPGADEPSFVLSGPTGTVVASGVRTGYSDVAAAAAALRTRQAPIVLGALPFDASGPVALHTPESVAFTEALPAWPTHEPGAVRVEQTVPEATEHRRRVAEAVARLRDPDSTLRKVVLARSIRLSSAAGWDARTVLNRLRAADPAAYTYLADLTPAGENHLGAVLVGASPELLVARFGNQVRCRPFAGSAARSQDPEVDRARGAALAESAKNRYEHRVVVDAIRDALAPLCSDLEVDAEPQLHHTDALWHLSTRVTGTLREKSTTALDLALALHPTPAVGGHPTAEATTAIAEIEGDRGFYAGATGWCDADGDGRWVVSIRCAQLSADRHTATAHSGGGIVADSDPDDELDETTTKFHTIMTGLGAAHG

SEQ ID NO: 94371 - protein, 351 aa, Myroides odoratus
  misc_feature (1)..(351): tr|A0A378RL13|A0A378RL13_MYROD Menaquinone-specific iso chorismate synthase OS=Myroides odoratus OX=256 GN=menF PE=4 SV=1
MRLYETWTQQIAEDKPFVLYKKPGQPHVIGLFQHDTTLHQVNPFTTSGFIVAPFYEGIRFYIPLAHATKIEEEVTVQLFESAAFELDYEAQPAKANFEDLVTRCVAAIKEDKFSKVVPARKEEVVLEINDIQPLFTKLLMAYPEAFCYVVYHPQIGMWMGATPETLVELKGQTLHTMALAGTQVNHGKEEVLWGEKEQEEQRYVTEFIVDKLQPLSTRIQVSDPFTKRAAKVMHICTDIEAELKEVNVQTVVEALHPTPAVCGMPKEVSREFLLKEEGYARKYYAGYLGELNSPTATGELHSQLFVNLRCMEIEKDHVNLYIGCGVTEDSDPISEFVETVNKSTTMKKVLF

SEQ ID NO: 94372 - protein, 108 aa, Myxococcaceae bacterium
  misc_feature (1)..(108): tr|A0A4Q5ZVE9|A0A4Q5ZVE9_9DELT Isochorismate synthase ( Fragment) OS=Myxococcaceae bacterium OX=2484252 GN=EOO7 1_16025 PE=4 SV=1
MGTAPALTAESEQESLATRLLRDYDAGSSFFFATPKRTMLARGVFATVPHAGGTNSMEGLPARVAAVLDASREAAHDIPVAVGAVPFDGRVEAQLVVPMTLQRAGPLV

SEQ ID NO: 94373 - protein, 452 aa, Myxococcales bacterium
  misc_feature (1)..(452): tr|A0A4V2AIA8|A0A4V2AIA8_9DELT Isochorismate synthase O S=Myxococcales bacterium OX=2026763 GN=EOO73_19605 PE=4 SV=1
MTQRDSAHYPIPWLSRENAEAGTAQPLQWLSVPAPLLQAESLLGVAPEVDAWYWSDGAEEQVGLGVARRLVGSGAERFEQLDRSLAELWRVLEPCVAAEAGAPEPRVFGGLAFQTGRASLIPWVDFGEGQLVLPRLTYTRREGRAWLTLIAPPSELTPATERARLLDEAAKLVSAASRLEEAEAPGPFELAEPDPAEWREQIRQVKAAIASGEVQKIVLARRVLARFARELSPTRVLSRLRESGPGAPRFAFRVGGSTFIGSPPERVLEKRGLRLATEAVAGTLPASDPEAALRLVEDAKLLTEHAPVIQDLLERLRPVAVVDPLPERPIPYLARQVWHLKTPITATLQKPERALSLLSRIHPTPAVGGYPTRPAVRFIAEHEADERGWYAGPIGWIDAHDDAQFAVALRSGVISGKHAHLYVGAGIVSGSDSESELAETGWKLRVLLGALG

SEQ ID NO: 94374 - protein, 400 aa, Myxococcus fulvus
  misc_feature (1)..(400): tr|F8CAV4|F8CAV4_MYXFH Isochorismate synthase DhbC OS=M yxococcus fulvus (strain ATCC BAA-855 / HW-1) OX=483219 GN=LILAB_26320 PE=4 SV=1
MQTLAAQLLESYEAGSSFFFATPRRTLLARGTFATVPHLGGAGALARLPERVTAVLNEARQADHDIPVAVGAVPFDGSVPAQLVVPLTLQRAGPLEFAQDVPVQRPLTASYTVQPVPEPAAYLNGVAQALKLMQRGPLQKVVLSRSLHLNAAAPIDLRKLLRNLAQRNPSGYTFAADLPAMEGTPGAGPRTLIGASPELLVSRSGFQVVANPLAGSAARSPDPLEDQERAAALLKSPKDLHEHAVVIHAVAEALRPYCKTLNVPAGPSLVNTATMWHLSSRITGELADPSISSLTLAAAMHPTPAVCGYPTRLAHEAIGSIEPFERGYYTGTVGWCDATGDGQWAVTIRCAEASERSLRLFAGAGIVVGSTPESELAETEAKFRTMLHAMGLGQSAGVQS

SEQ ID NO: 94375 - protein, 414 aa, Myxococcus xanthus
  misc_feature (1)..(414): tr|Q1D690|Q1D690_MYXXD Isochorismate synthase OS=Myxoco ccus xanthus (strain DK 1622) OX=246197 GN=MXAN_3646 PE =4 SV=1
MTPAEPKEQEHPMGPQTLAAQLLESYEAGSSFFFATPRRTLLARGTFATVPHQGGADALARLPVRVTAVLNDARQADHDIPVAVGAVPFDGSVPAQLVVPLTLQRAGPLVFDKDVPVQRPFSASYTVQPVPEPAAYLNGVAQALKLMQSGPLQKVVLSRSLHLNAAAPIDLRQLLRNLAQRNPSGYTFAADLPQQDGTRGAGLRTLIGASPELLVSRSGFQVVANPLAGSAARSADPLEDQERAAALLKSPKDLHEHAVVIDAVAEALRPYCKTLNVPAGPSLVNTATMWHLSSRITGELADPSISSLTLAAAMHPTPAVCGYPTRLAHEAIGSIEPFERGYYTGTVGWCDATGDGQWAVTIRCAEASERTLRIFAGAGIVVGSTPESELAETEAKFRTMLHAMGLGHGAGVQS

SEQ ID NO: 94376 - protein, 409 aa, Naasia sp.
  misc_feature (1)..(409): tr|A0A4S4FLS1|A0A4S4FLS1_9MICO Isochorismate synthase O S=Naasia sp. YIM 131853 OX=2565933 GN=E6C64_10705 PE=4 SV=1
MAVTTTALPIEAHELESLLALADPQNPLIWLRHGEGMIGLGEALRLSFEGPERFADAASAWRAVVGQAEIDDRVGVPGTGLVAFGSFAFAAGSAAASTLLVPRTIVGHRDGVSWLTRIALRDELGSDPAETPTPHEDGPAYPLEFIRGTLDAAGYARAVRAAVGRIEAGDVGKVVLARDIFAPIPADADLRHPLRRLATSYPDTWTFALDGLIGSSPETLVRVDHKAVSARVLAGSTGRRTDAAADRRAAEELADSEKNQQEHGFAVRSILESLGRHTSALTVSDPFTLRLPNIWHLASDLDGILADGSSSLDLLGALHPTAAVAGTPTPAALDLIDELEPFDRGVYAGPVGWVDARGDGEWAIALRCGVVADGRVTAYAGCGIVAGSEPQRELAETRLKFRPIVDAFA

SEQ ID NO: 94377 - protein, 404 aa, Nakamurella silvestris
  misc_feature (1)..(404): tr|A0A399UPQ7|A0A399UPQ7_9ACTN Isochorismate synthase O S=Nakamurella silvestris OX=1645681 GN=D1871_20530 PE=4 SV=1
MVRTVAAPGLPADLISSLPTPTGTLSFVSEGEGLVGWGEFARFTTSGPTAAEDIDRWWTDLCATLDVQVDVEGAGTGPVVFVSLGFADDDESVAIVPRTVLGCRDGRTFITTVGPVPALTGREPVRAPGQISYSDASVSIGDYTGAVGQAVERIKAGEADKVVLARDLLATAAEPVDQRFLLRRLADSYPTCWTFAVDGLLGATPEMLLRREGNEVSSRVLAGTAWPERAGEHTTGRVATGLLASAKDLSEHAYAVSSVSDVLGRISSDLRVPRHPHVLPLANLTHLATDIHGTIDPAAGRASSALMLAARLHPTAAVGGSPASAAKRLIAELEPMRRGRYAAPVGWMSADGDGEFGIALRCAQVSDRQVRMFAGCGIMAGSDPEVEAREAQIKMIPIRDALEG

SEQ ID NO: 94378 - protein, 437 aa, Nakamurella sp.
  misc_feature (1)..(437): tr|A0A3G8ZNN4|A0A3G8ZNN4_9ACTN Isochorismate synthase O S=Nakamurella sp. s14-144 OX=1902245 GN=EH165_12000 PE= 4 SV=1
MSASLFPSAQTIDLAPQPTVESASRPAAFTAVTVQLPGSRDDLLTNVPVPTGVLSFLSEGEGLVGWGTYASFTASGPDAAAHIAAWWADLSADLIVSDDVGVPGSGPIVFISLGFDDTDTSVALVPQTVLGSRDGRRFRTTIGPATMAAPPAQLVPVTAPGRISYSDAAVSVSDYIEAVTAGISRIRAGELKKVVLAHDLVATAENVVDERYVLSRLSQAYPTCWTFAVAGLVGATPEMLLRRRGLRISSRVLAGTAWSDRAGAHTAGTVATGLLASSKDLAEHAYAVDSVASVLGAVSADLQVPGAPRALPLANLTHLATDITGTLPAESDGPSTSALALAAALHPSAAVGGFPKDVARGLIRELEPMERGRYAAPVGWMNAAGEGEFAIALRCAEISGNTVRMMAGCGIMADSDPEKEAREAQIKMIPVRDALEG

SEQ ID NO: 94379 - protein, 452 aa, Natrarchaeobius chitinivorans
  misc_feature (1)..(452): tr|A0A3N6M2I7|A0A3N6M2I7_9EURY Isochorismate synthase O S=Natrarchaeobius chitinivorans OX=1679083 GN=EA472_189 80 PE=4 SV=1
MDRTPGGRRLAAESRSLADGEPIELVSRSCEVDDVSFAAVVDAADESRILWATPEGLEIAGRGVAAGFSAAGPDRYDAIRRQADRVFDRLEHGGPTVARPRAFGGFSFHDGSDADPPWTGFDPASFVVPQVFVTRDETDGIWLTAVADDREAVDARLERWRDRLTDGPTMCASGSAPGVESTERSTSPERWAEQISRALDRIDDGRLTKVVLAQALSVDLTVPVDVPATLERLRRQYPSCYRFLVGHGVGGTFFGAPPEQLVSKRGERVGTEALAGSAPRGRTPEADEEYAERMLADEKLRREHELVVDAIREQLGPLASELTVSDRTLRKLATIQHLRTPISATLETDRHVLELVEALHPTPAVGGVPPESAWETIHETETFDRGWYAAPVGWFDGSGDGEFAVALRSAITAGESATLFAGNGIVADSDPDDEWEEVQLKFRPILDELRER

SEQ ID NO: 94380 - protein, 452 aa, Natrarchaeobius halalkaliphilus
  misc_feature (1)..(452): tr|A0A3N6LLG5|A0A3N6LLG5_9EURY Isochorismate synthase O S=Natrarchaeobius halalkaliphilus OX=1679091 GN=EA462_0 7340 PE=4 SV=1
MERTSGGRGLAAESASVEHEEPIDLVSCSRDVTDVSFGAIVDTDDEPRILWTAPNGLEIAGRGVAARFTAAGPNRFERIRTSADRVFDALEHDGPPVARPRAFGGFSFHDGHAPNPPWTGFDAASFVVPRAFVTRDDTGGIWVTAVGNGPDDAYDRLDHWHERLTSGPAMRASGSGPGVTSTRRSTSPEEWNEQIESALGRIEDGRLTKVVLAQALSIDLESSVDVPTMLERLRRQYPNCYRFLVSHETGGTFFGAPPEQLVSKRDDRVETEALAGSVARGETPESDDELATRMLADEKLEREHELVVEAIRDQLEALACELAIGDRRVRKLNTIQHLRTPLSATLAGDHHVLELVEALHPTPAVGGVPPTNAWETIRQTEAFDRGWYAAPIGWFDADGNGEFAVALRSALAVDDTVTLFAGNGIVADSDPAEEWTEVQLKFRPILDELKTR

SEQ ID NO: 94381 - protein, 554 aa, Natrialba magadii
  misc_feature (1)..(554): tr|D3SU31|D3SU31_NATMM Isochorismate synthase OS=Natria lba magadii (strain ATCC 43099 / DSM 3394 / CIP 104546 / JCM 8861 / NBRC 102185 / NCIMB 2190 / MS3) OX=547559 GN=menF PE=4 SV=1
MNRTSGEGELAGTAPSHDQDQDQDHHDRTPSSPSSLCGRSRELTDAAADISFGALLDADIDIESGADTGTGTNTDTDTDTDTDTDTGNRTDTTTHCHYKTRIQWATPGGLEIVGRGVAAQFTTTGPTRFDDVREQAARTFGALEYDGPAVARPRAFGGLSFHDSFEDAFERAGETNADTAAATAPWRGFTAASFVIPQVLVVRDDETTWLTAVGPDADTATERLDEWHDRLADASFPAMRSSGSPPGVTDTERTTSRAAWVEQVEDAIERIETTTLRKVVLAQSLSVGLADEIDVPATLERLRRRYPNCYRFLIDHNHARSSDGGGTFFGAPPERLVSKRGERVETEALAGSAPRGETPEADEEFADQLRDSEKVQHEHVLVAEAIRDQLTPVTSSLTIDEQQIRRLATIQHVRTPIEATLDDEVTHVLELVEALHPTPAVGGMPPDEAWETIRETEPFDRGWYAAPIGWFDGNGDGEFAVALRSGVATDERVTLFAGSGLVADSDPHDEWDEVQLKFRPILDELRPEEASTAQSERGSDQSATETDEERPQPR

SEQ ID NO: 94382 - protein, 454 aa, Natrialba sp.
  misc_feature (1)..(454): tr|A0A5D5AH77|A0A5D5AH77_9EURY Isochorismate synthase O S=Natrialba sp. ESP3B_9 OX=2448032 GN=FYC77_15145 PE=4 SV=1
MDRTSGEGQLTAESPADSNPDEQANDLVARSRAVGDVSFAAVVDDAELPRILWAAPDGLEIAGQGIAAHITATGPDRFDRLQAQAKQVFDTLEYHGSTVARPRAFGGFSFHDGHEPTPPWTGFAAASFVVPRAFVTRTERDGVWLTVVSDSVDEADDRLERWDDRLTEGPTMCSSGTGPGVVSTHRTTSPSAWASQIEHALDRIENDRLVKVVLAQALSVDLEAPVDVPETLERLRRRYPNCYRFLVGQRDGGTFFGAPPERLVSKHGADVETEALAGSAPRGETPESDDEYADRMFDDEKLQHEHDLVVRAIREQLDSLARELTIDDRRIRKLATIQHLQTPITATLERDRHVLELVEALHPTPAVGGVPPDRAWETIRETETFDRGWYAAPIGWFDGDGDGEFAVGLRSAVASGDTATLFAGNGIVADSDPDEEWEEVELKFRPILDELRDR

SEQ ID NO: 94383 - protein, 447 aa, Natrinema altunense
  misc_feature (1)..(447): tr|A0A482XWS4|A0A482XWS4_9EURY Isochorismate synthase O S=Natrinema altunense OX=222984 GN=ELS17_00965 PE=4 SV= 1
MDRSLGDGRLTGETGAVDAAGDLVSRSRELEDVSFSAILDGSAESRVQWATPGGLELVGRGVAARFTADGPDRFDRVRTQASRAFDGLVHDGPEAARPRAFGGVSFHDGHEPAPPWTGFDAASFVVPQVLVTRTDDGTWLTAVGNRSDDVDDRLERWHERLTALPAMRPSGSTPGVAATRRTTSPAAWTSQVEAVLERITDGRLTKAVLAQALSVTLEGPVDVPATLERLRRRYPNCYRFLVSHDIGGTFFGAPPEGLVSKRGQRVETEALAGSVPRGETPAEDEEHVDRMRADEKFQHEHGLVVDAIRKQLAPFARDLTVSDQTIRRLATIQHLQTPIEATLSGDRHVLEIVEALHPTPAVGGVPPDVAWETIRDTETFERGWYASPVGWFDADGDGEFAVAIRSGIAADGTVTLFAGNGIVGDSDPEEEWDEVQLKYRPILDELQ

SEQ ID NO: 94384 - protein, 447 aa, Natrinema pallidum
  misc_feature (1)..(447): tr|A0A4P9TFM4|A0A4P9TFM4_9EURY Isochorismate synthase O S=Natrinema pallidum OX=69527 GN=FGF80_10375 PE=4 SV=1
MDRSLGDGRLTGDTASVDGADDLVSRSRELEGVSFSAILDGSAESRVQWATPGGLELVGRGVAARFTAAGPDRFDRVRTQASRAFDGLVHDGPEAARPRAFGGVSFHDGHEPAPPWTGFDAASFVVPQVLVARTDDGTWLTAVGNRSDNVDDRLERWHERLTALPAMRPSGSTPGVAATRRTTSPATWTSQVEAVLERIADGRLTKAVLAQALSVTLEGPVDVPATLERLRRRYPNCYRFLVSHDIGGTFFGAPPERLVSKRGQRVETEALAGSVPRGETPAEDEEYVDRMRADEKFQHEHGLVVDAIRKQLAPLARDLTVSDQTIRRLATIQHLQTPIEATLSGDRHVLEIVEALHPTPAVGGVPPDVAWETIRDTETFERGWYASPVGWFDADGDGEFAVAIRSGIAADGTVTLFAGNGIVGDSDPDEEWDEVQLKYRPILDELQ

SEQ ID NO: 94385 - protein, 447 aa, Natrinema versiforme
  misc_feature (1)..(447): tr|A0A4P8WI00|A0A4P8WI00_9EURY Isochorismate synthase O S=Natrinema versiforme OX=88724 GN=FEJ81_10720 PE=4 SV= 1
MDRSSGDGRLAGGTDPAGEADGLVSRSRELEDVSFSAILDGSAESRVQWATPDGLELVGRGVAARVTAAGTDRFDRIRTQARRAFDGLAHDGPEAARPRAVGGVSFHDGHEPDPPWTGFDAASFVVPQVLVTRTDDGTWLTAVGNRADEADDRLERWHERLRDLPAMRPSGSTPGVAATRRTTSQADWTTQVETALERIADGTLTKVVLAQALSVELEGPIDVPATVERLRRRYPNCYRFLVGHGIGGTFFGAPPERLVSKRGDRVETEALAGSVPRGETPAEDEEHVERMRADAKFQHEHGLVADAISDQLEPLARELTVREQTIRRLATIQHLRTPIEARLEGDRHVLELVEALHPTPAVGGVPPDAAWETIRETEPFERGWYAAPVGWFDADGDGEFAVALRSGVAADGTVTLFAGNGIVADSDPDEEWPEVELKFRPILDELR

SEQ ID NO: 94386 - protein, 445 aa, Natronococcus occultus
  misc_feature (1)..(445): tr|L0JZF9|L0JZF9_9EURY Isochorismate synthase family pr otein OS=Natronococcus occultus SP4 OX=694430 GN=Natoc_ 1679 PE=4 SV=1
MDRTLDGRQSAVDSRPDSGGLTSRSRELEDVSFGAVVEADDACRVQWATPDGLEVVGRGVAARFRARGPERFDEIRTQAEAAFDDLDHRGPVVARPRAFGGFSFHDGHDAGGVWHGFEAASFVVPAMLVTRSDDGTWLTAVANDAEDATRRLEDWHERLLELPAMRPSGSGPGVAETRRTTAIESWRAQVETALERIDAGELTKVVLAQALSVDLEGPIDVPATVERLRRRYPNCYRFLVGDGTSGTFFGAPPERLVSKRGDRVETEALAGSVPRGETPEADDDHAERMLDSEKLRREHGLVAEAIRDQLAPLASELTVAERTIRRLATIQHLQTPIEATLEADRHVLELVEALHPTPAVGGVPPGTALETIRETESFDRGWYAAPIGWFDAAGDGEFAVGIRSGLATDETVTLFAGNGIVADSDPEEEWEEVQLKFRPVLDELK

SEQ ID NO: 94387 - protein, 451 aa, Natronolimnobius sp.
  misc_feature (1)..(451): tr|A0A4S3TR03|A0A4S3TR03_9EURY Isochorismate synthase O S=Natronolimnobius sp. XQ-INN 246 OX=2419781 GN=D8Y22_1 0345 PE=4 SV=1
MDRTSGEKGLAAGVPPSDGEASTDLVSYSRELEDVSLRAIVDDTARSRIQWAAPDGLEIAGRGTAVRFTATGADRFTALRTQADTTFDSLTHNGPRVARPRAFGGFAFHDTHDPTPPWSGFEAASFVVPRLSVTRSPDGDTWLTAVDTDPDAATDRLAEWAHTLAETPPMQPVGSRPGVASTRRPTSPAAWADGVTAALDRIDGGDLTKVVLAQSLSVRLAEPIEVPDTLERLRREYPNCYRFLLNQEGSGTFFGAPPEQLVSKRGDRVDTEALAGSVPRGETPEADDEHAERMLDDDKLRHEHDLVVDAIRTQLAPFADDLTVADRTIRRLATIQHLHTPIAATIDADSHVLELVEALHPTPAVGGVPPDIAWQTIRRTEPFDRGWYAAPIGWFDGDGDGEFAVGLRSGVATDETVTLFAGNGIVADSDPAEEWDEVQLKFRPVLDQLKR

SEQ ID NO: 94388 - protein, 445 aa, Natronomonas moolapensis
  misc_feature (1)..(445): tr|M1XKM9|M1XKM9_NATM8 Isochorismate synthase OS=Natron omonas moolapensis (strain DSM 18674 / JCM 14361 / 8.8. 11) OX=268739 GN=menF PE=4 SV=1
MEPLGSEKAAPRTRGLVSRATKLSTVPDRRAVLSVADSPRTFWSAPGEATVIGSGSATTIRADGPDRFRAIREAATELFSVGDVHAGALAARPRLFGGFAFHDEHTETAPWEGYPGAKFVLPRTQVTYAGEEAWLTVNGIGATPGAVERRLEEAADQFETLPDPGSVGTPPGIAGRTRTTSEAEWRESVVAATDRIAAGELRKVVLAQALRTSLERPLSMPATLTRLERRYPDCYRFLIEPDDGSGGFFGATPERLVGRSGRTVETGALAGTTGRGDTPEEDEWLAAELLADEKNVHEHELVADAVRSQLAPYAASVRTGERSIRRLATVQHIETPITAELTDDEHVLDLVEALHPTPAVGGLPPTEALRTIRDTEPFERGWYAAPVGWFDAAGYGSFAVAIRSALARGPTATLFAGVGIVEDSDPDREWDEVQLKYRPILDELE

SEQ ID NO: 94389 - protein, 445 aa, Natronomonas pharaonis
  misc_feature (1)..(445): tr|A0A1U7EWJ1|A0A1U7EWJ1_NATPD Isochorismate synthase O S=Natronomonas pharaonis (strain ATCC 35678 / DSM 2160 / CIP 103997 / NBRC 14720 / NCIMB 2260 / Gabara) OX=348 780 GN=menF PE=4 SV=1
MEPLRSTELCPDETQLVSRSRRLSAPPDPRTALSMADAPRTLWAAPDEATVVGSGAAETIRADGNDRFRAVREAANELFATGDVHAGTLSARPRLFGGFAFHDEHDPAGPWRGFPGARFVLPETQLTYAEDGTWLTVHGVGRDVEAVESALEAAADRFDGATTPRPPAGPPGIERRERTTSKDRWRESVTAAIDRIEAGELRKVVLAQALQTALSRPVSLPDVLTRLADTYPDCYRFLIEPDDGGAGFFGATPERLVGRRGRTVETGALAGTTGRGDTPLEDEWLAEELRSDAKNVHEHELVADAIRDQLQPYAASVRTGERGVRRLATVQHLETPITAELAADEHVLSLVEALHPTPAVGGLPPDKALATIRDTEPFERGWYAAPVGWFDAAGNGSFAVAIRSAVAHGEAATLFAGVGIVADSDPDREWDEVQLKYRPILDELE

SEQ ID NO: 94390 - protein, 445 aa, Natronomonas sp.
  misc_feature (1)..(445): tr|A0A4U5JPJ8|A0A4U5JPJ8_9EURY Isochorismate synthase O S=Natronomonas sp. F20-122 OX=2217661 GN=DM868_03405 PE =4 SV=1
MEPLGSEETAPLDRELTSRTIRLTAAPDQRVALATAETPRTFWAAPGEATVVGSGSATTIRADGRDRFQAVQDAARELFSAGDVHAGALAARPRLFGGFSFHDEHASAGPWGGYPRAKFDLPRTQLTYTDDGTWLTVNAVDTDAERVERRLDAEVERLRSISSPDAGGGPPGIVDRTRTTSEANWRRSVTAATDRIAAGELRKVVLAQALRVTLARPLLLSDTLSRLGERYPDCYRFLIEPDDGAGGFFGATPERLVGRHGRTVETGALAGTTGRGETPEEDEWLAAELLADEKNVHEHELVADAVRTQLEPYAASIRAGERAIRRLATVQHIETPITAELADDVHVLELVEALHPTPAVGGLPPKEALRTIRDTEPFERGWYAAPVGWFDAAGYGSFAVAIRSAVARDDTATLFAGVGIVADSDPDREWDEVQLKYRPILDALE

SEQ ID NO: 94391 - protein, 449 aa, Natronorubrum bangense
  misc_feature (1)..(449): tr|A0A4D6HQB4|A0A4D6HQB4_9EURY Isochorismate synthase O S=Natronorubrum bangense OX=61858 GN=DV706_14975 PE=4 S V=1
MDQSSGGRRLTADTESLPVDEPTDLVSRSRELEDVSFGAIVDAEQESRILWATPGGLEVVGRGVAVRMSARGPDRFDRIREQASRAFDALDHDGPHVARPRAFGGFSFHDEHEPGPPWTGFDAASFVVPQILVIRSEDGTWLTAVGTHPEAAIERLERWHDRLAALPAMQPSGTGPGVTSTQRTTSPADWTDQVEAALEQIEQGTITKVVLAQSLSVTLENSVHVPGTLERLRRQYPNCYRFLIANDTGGTFFGAPPERLVSKRDNRVETEALAGSVPRGETPEEDDAHAADMLDSEKVQREHGLVVEAIRNQLEPLASELTVDERTIRRLATIQHLQTPIAATLEGESHVLEIVEALHPTPAVGGVPPVAAWETIRDTETFDRGWYAAPVGWFDADGDGEFAVGLRSGVASDDTVTLFAGSGIVADSDPDDEWDEVQLKFRPILDELR

SEQ ID NO: 94392 - protein, 463 aa, Negativibacillus sp.; identical to SEQ ID NO: 93435
  misc_feature (1)..(463): tr|A0A3A8XN52|A0A3A8XN52_9FIRM Isochorismate synthase M enF OS=Negativibacillus sp. 1xD8-3 OX=2320085 GN=menF P E=3 SV=1

SEQ ID NO: 94393 - protein, 320 aa, Neisseria meningitidis
  misc_feature (1)..(320): tr|C6SIW0|C6SIW0_NEIME Putative chorismate binding enzy me OS=Neisseria meningitidis alpha275 OX=295996 GN=ybbE PE=4 SV=1
MPSEPLFGRHLIFASLTCLIDAVCKKKIPITQNVYILSILRMTRSKPVNRTAFCCLSLTAALILTACSSGGGGVAADIGAGLADALTAPLDHKDKSLQSLTLDQSVRKNEKLKLAAQGAEKTYGNGDSLNTGKLKNDKVSRFDFIRQIEVDGQLITLESGEFQIYKQDHSAVVALQIEKINNPDKIDSLINQRSFLVSGLGGEHTAFNQLPDGKAEYHGKAFSSDDAGGKLTYTIDFAAKQGHGKIEHLKTPEQNVELAAAELKADEKSHAVILGDTRYGSEEKGTYHLALFGDRAQEIAGSATVKIGEKVHEIGIAGKQ

SEQ ID NO: 94394 - protein, 367 aa, Neochlamydia sp.
  misc_feature (1)..(367): tr|A0A0C1K3I2|A0A0C1K3I2_9BACT Salicylate biosynthesis isochorismate synthase OS=Neochlamydia sp. EPS4 OX=1478 175 GN=pchA PE=4 SV=1
MKCKRKFDGGNMRLARQDWRCFIESGSLIRLNKDNYLIGWGARTWLENIYESPSPFFYFPDFFLSSPCPWFQHEYTAIVSHHEFLAAMHTYPATPLPLSWKNPYLAHFENTCKELHTHFYNKKLKKAVPYIFEESLSTMTLDRLGSTLKHLINYVKDQQLHVYGYWEETEGILGASPEILFNYHNASEGLIETVACAGTKRYRDSDSIFIQDSKELYEHQLVIEGIQESLSSLGVVTIGELQILQLPKISHLMTPIQLKMKGPSNFLALVKALHPTPALGAFPKEEGRKWLHLYNDKIDRWRYGAPVGCLFDNKRQARCIVGIRNVQWNSQGAKIGAGCGIVPASQWHHEWQEINLKLLSIKEMIAL

SEQ ID NO: 94395 - protein, 423 aa, Nicoletella semolina
  misc_feature (1)..(423): tr|A0A4R2N5I8|A0A4R2N5I8_9PAST Isochorismate synthase M enF OS=Nicoletella semolina OX=271160 GN=menF PE=3 SV=1
MHFFTELKQQLSQKLAALQPKQGLCQIQVENNLDLDDLQLVSWLKGQDCFPHFFWKSRDQALTFVSVGAVRQLASLAEVEYFQQHYPFKLFGGLRFEGSCYFVLPRFYFEKNAEKLTAYLTLDTDCLAEFTVCEQFLIQLEWLELPAFRASTPIYRALDCDFLRWQEMIDRALAAIDAGHFEKVVLANATKLQFERPLCAYSLSVLSQQNNHGSYHFLWAKNAQHIFIGASPERLYQRIGRQLYTEALAGTVAVTENAEQTEQNAQWLLNDGKNIYENQLVVEDISNQLINCIQEISVQATEIKRLKKVQHLQRKIQASLKPFVSDVDCLNRIHPTAAVSGLPRDKAKQFIRDNEQTARGWYAGALGYLAPQFAEFCVTLRSALVENANITLYAGAGIVAGSEASTEWQEIERKFLTIASLLV

SEQ ID NO: 94396 - protein, 152 aa, Nicotiana tabacum
  misc_feature (1)..(152): tr|Q6I692|Q6I692_TOBAC Isochorismate synthase (Fragment ) OS=Nicotiana tabacum OX=4097 GN=ics PE=2 SV=1
  misc_feature (126)..(126): Xaa can be any naturally occurring amino acid
AYQFCLQPPQSAAFIGNTPEQLFHRDSLSICSEALAGTRARGGSELLDLKIGQDLLSSAKDHNEFAIVRECIRRKLEAVCSSVLIEPKKAIRKFPRVQHLYARLRGRLQTEDEEFKILSSIHPTPXVCGYPTEDARAFISETEMFDRRMYAG

SEQ ID NO: 94397 - protein, 456 aa, Nissabacter sp.
  misc_feature (1)..(456): tr|A0A4P8SGR7|A0A4P8SGR7_9GAMM Isochorismate synthase M enF OS=Nissabacter sp. SGAir0207 OX=2126321 GN=menF PE= 3 SV=1
MVIEVTVSILPGVFQQLDAALAQALLDPAWPSASGVRQLSLTFMADDDEPLLDWLAAQPHYPKFYWQPREGTERVAICGQVAQFGTLRQASDYVRQHSDTAGRLRVWGVNAFDAAPVEGTPQAACLFVPRLTLHQQAHTLTLTLTLADPYALHGDLARAAAFLQQLQPAAVLPPLHTTLVHASHQPDEEGWQEMVEQALQQIDAGELEKVVLARQTVLTFNQPVEPGQMLAASLAVNHHCYHFMMAFSPEEAFLSASPERLFLRQGDQLTTEALAGTVANSEEADQAQALAAWLMGSEKNQRENWLVVDDICQRLQGGAQALDVMPPEIVRLRKVQHLRRRIHGRLRQAEDGDCLARLQPTAAVAGLPRQPARSFILCHEPFPRHWYAGSAGYLSRDQSEFAVSLRSALIRANQVHLYAGAGIVAGSDPAGEWQEVENKAAGLRSLLHPDDGQSPL

SEQ ID NO: 94398 - protein, 458 aa, Nitrococcus mobilis
  misc_feature (1)..(458): tr|A4BLT3|A4BLT3_9GAMM Salicylate biosynthesis isochori smate synthase OS=Nitrococcus mobilis Nb-231 OX=314278 GN=NB231_15663 PE=4 SV=1
MNILTRMWDFESVFTAARAQARQACQPVLAVLTFLWTGRDPLELYEQLESSSVPCLYWETRDPELTLLGIGRTLELCPDPGSGFERVEQRWREMTVAALVEGSAAPRAIGGFRFDAEAVPEWPWRQFPSARLIVPRLLLERTPQGSLLVCQKLIGVDDDPIAEGHRYRRDIEALLGQGASSRRQAKPSLVQNQGVSAGQWQSKAEALIEAIRKGRLQKVVLARHLHQTYSEPLSPAAILRRLRRSDARSHLFAVRHGDLCFLGATPERLVSVREGRVRTHALAGTIQRGDDPETDQRLGQQLLSSAKDRHEHALVVRAIRDALAPLVEGLTVSPKPVLHRLPVMQHLSTTIEARIAGVNGILKLVEVLQPTPAVAGHPKGEALSCIRLHEGFDRGWYAGPLGWIDGNGNGDFVVALRSALIKGRDCHLFAGCGLVADSVPEYEYQETCLKLSSMQEAV

SEQ ID NO: 94399 - protein, 260 aa, Nitrolancea hollandica
  misc_feature (1)..(260): tr|I4EJL3|I4EJL3_9CHLR Menaquinone-specific isochorisma te synthase OS=Nitrolancea hollandica Lb OX=1129897 GN= NITHO_4100004 PE=4 SV=1
MADGVDAVRGGALEKVVLARQVSIRSDLPFDVVNALQRLRASYPTCYVFAVARGDQVFLGATPERLARLRDRAVQVACLAGSRERGMTPEEDRRLGDALLDSTKDRSEHAVVLRALREALAPVCSEVSAPDEPALLSVRNVHHLYTPVTGRLANGACMLDIVARLHPTPAVGGFPSRDALRFIREREDLDRGWYAAPVGWVDHHGEGEFAVALRSALIAGSEAALFAGCGIMAGSDPEQEYAESWLKLRPVLSALGGREP

SEQ ID NO: 94400 - protein, 366 aa, Nocardia africana
  misc_feature (1)..(366): tr|A0A378WK00|A0A378WK00_9NOCA Isochorismate synthase d hbC OS=Nocardia africana OX=134964 GN=dhbC PE=4 SV=1
MDGFLLAQPGGVVRTTGIRRAFDDARRAATALRDGAAELIVGAIPFDPGDAAALCEPQQAQHSAGPWRPAAVPPLPEVRVVAEIPSPAEHVARVTKLVEQLSDPGQPLRKVVAARSLIAEAEQPLEPEVVAAHLLVRHPQANVFAVDLTPAGRTGAHLVGATPEVLVARHGDTVTLRPLAGTLPRHPDPALDAERSRELLSSTKNRDEHAFVIEWIREQLGPVCAELAIPDGPELINTTEVWHLATPITGRLRDPATSALDLALLLHPTPAVCGTPTALALRTITEYEEPRGFYGGAVGWCDARGDGEWVVAIRCAELSADGRTAQAYGGGGIVAASDPRTELDETTAKLRTLLNGLACPVPDQPS

SEQ ID NO: 94401 - protein, 368 aa, Nocardia brasiliensis
  misc_feature (1)..(368): tr|A0A379BHB5|A0A379BHB5_9NOCA Isochorismate synthase d hbC OS=Nocardia brasiliensis OX=37326 GN=dhbC_2 PE=4 SV =1
MGGVERAATCVLTGPEGSLVGTGVRHSYTDLDTAAKALRNDDASILLGALPFDPAAPAALIDPIAFRRAPDRWRHGRNAEPWRPRLRSIEPDPSAAEHQRRIESALDAIAAGLLDKVVLARRMRLTTERAINGVAMLRALVGRDPRANGFYLDLAAFRGPGAALVGASPELLIRRTGSQVYACPLAGSAPRRGAVEADRTAARLLASEKDRREHRFVVDFIVSALAPLCSTLRWSEKPEIFGTPDLVHLGTPIRGTLADPGCTSLDLARVLQPTPALGGTPRGEAMRLIEEIEGDRGFYGGAVGWCDRSGDGAWSVCIRCAEIAPGGHVATAFAGGGIVAGSEPAAEVEETMAKFRAILSVFDDEPAA

SEQ ID NO: 94402 - protein, 366 aa, Nocardia cerradoensis
  misc_feature (1)..(366): tr|A0A231HBI4|A0A231HBI4_9NOCA Putative isochorismate s ynthase MenF OS=Nocardia cerradoensis OX=85688 GN=menF PE=4 SV=1
MDGFLLAQPGGVVRTTGIRRAFDDARRAAAALRAGAAELIVGAIPFDPADAAALCEPEQAQHSAGPWRPAAVPPLPEVRVVAEIPSPAEHVARVTKLVEQLSDPAQPLRKVVAARSLIAEARQPLEPEVIAAHLLVRHPQANVFAVDLTPAGRSGAHLVGATPEVLVARHGDTVTLRPLAGTLPRHADPAVDAERSRELLSDTKNRDEHAFVIEWIREQLTPVCAELAIPEGPELINTAEVWHLATPITGRLRDPATTALDLALLLHPTPAVCGTPTDLALRTITEYEEPRGFYGGAVGWCDARGDGEWVVAIRCADVSADGRTVQAYGGGGIVAASDPRTELDETTAKLRTLLNGLACAVPDQPS

SEQ ID NO: 94403 - protein, 364 aa, Nocardia cyriacigeorgica
  misc_feature (1)..(364): tr|A0A4U8W5M6|A0A4U8W5M6_9NOCA Isochorismate synthase d hbC OS=Nocardia cyriacigeorgica OX=135487 GN=dhbC PE=4 SV=1
MDGFLLAAPDGVVRAHDTRATFDDAQQAVTALRDGTAPMVVGALPFDPREPAALSVPGRVEHTAGPWRPAAVPELPPVSVISELPSTGEHLARVAKLVEQLADSRQPLRKVVAARSVLAAAEEPLDAEVVAAQLLTRHPRAHVYAVDLTPAGRAGETLVGATPEVLVSRHGRTVTLHPLAGTLPRLADPDADAVQARELLASTKNRDEHAFVIDWIADKLRPLCTSLSIPDGPELVQTQQVWHLGTPITGTLRDPAPTALELALLLHPTPAVCGTPTPQALEAIIELEGDRGFYGGAAGWCDGNGDGDWVVAIRCAEIAADGLSLRAFAGGGIVAASEPRIELDETTAKLRTLLDSLNCALPPN

SEQ ID NO: 94404 - protein, 364 aa, Nocardia farcinica
  misc_feature (1)..(364): tr|A0A0H5P1I9|A0A0H5P1I9_NOCFR Isochorismate synthase d hbC OS=Nocardia farcinica OX=37329 GN=dhbC PE=4 SV=1
MNGFLLARPDGVLRASGVRAAFDAVNDARAALRTGAAAIVVGALPFDPARPAALVAPAEQVHTAGPWRPAALPPLQRVQVVSEFPSAGEHLARVAKLVEQLDDPDTELRKVVAARSVLAEADGVLEPETVAAQLAARHPGASVFAVDLTAAGRTGATLIGASPELLVARQGRTVTLHPLAGTAPRRADPDADAAQAAELLDSAKNREEHSYVIEWIRDVLTPLCTELRIPEGPRLVETHDVWHLATPIVGTLREPAPTALDLAVLLHPTPAVCGTPTAAALETITRVEGDRGFYGGAVGWCDADGDGTWVVAIRCAELAADGRSLRAYAGGGIVAASQPQAELDETTAKLRTFLGGLDCAVPTH

SEQ ID NO: 94405 - protein, 362 aa, Nocardia otitidiscaviarum
  misc_feature (1)..(362): tr|A0A516NYG7|A0A516NYG7_9NOCA Isochorismate synthase O S=Nocardia otitidiscaviarum OX=1823 GN=FOH10_32830 PE=4 SV=1
MDGFLLATPGAVLRTAGVRAALDTAEDAAAALRDGAELVVGALAFDPRRPAALAVPERSAYTAGPWRPGALPELPPVRVVTEIPSAAEHVARVTKLVEQLADPGQPLRKVVAARSLIAAAESPLEPEVIAAHLITRHPNANVFAVDLGPAGRDGETLIGATPEVLVARHGRTVTLRPLAGTLPRRPDPADDAAQARELLASTKNRDEHAFVIEWIRERLTPVCAELTVPDGPEIIGTAEVWHLATPITGQLRDADVTALDLAVLLHPTPAVCGTPTDLALDAITELEEDRGFYGGAVGWCDAHGDGEWVVAIRCAELSADGRALRAFGGGGIVAASDPRAELDETSAKLRTFLGGLRCALPT

SEQ ID NO: 94406 - protein, 366 aa, Nocardia seriolae
  misc_feature (1)..(366): tr|A0A0B8NHC0|A0A0B8NHC0_9NOCA Isochorismate synthase O S=Nocardia seriolae OX=37332 GN=D6158_34515 PE=4 SV=1
MREPVRFRLSGASGPVGLDGPLICYHSLAEAEAAVRAGNYGNLVAGSIPFDDGAANPSLYLGWRGAHQPEAAPDAKAATHFRADIDFNDGSIADYLRLLDDALALLRSPEATLEKIVIARSERYFYDGVVDPIRLFERIASLYPNARNYFVEHLDHPGVYTMGASPELFLRKTGPAVVMTPLAGTVPRDTRLPESADRGRAHDLLFDDKYLAEHRHLVDFMVKGLAPFCSDLDHAAQPELVAAPGLWHLGTPITARLLDPETPVADLVAALHPSPAVCGVPQEEARRMIARYESAREYYGGLIGWLDGAGDCEFHMALRGLELDTHRGNLTLRAGGGIVARSRIDIEFAETSAKLATMRRVLGLPR

SEQ ID NO: 94407 - protein, 363 aa, Nocardia sp.
  misc_feature (1)..(363): tr|A0A386ZHC3|A0A386ZHC3_9NOCA Isochorismate synthase O S=Nocardia sp. CFHS0054 OX=2382165 GN=D7D52_21490 PE=4 SV=1
MDGFLLATPDGVVRTSGARAGFDTAAAAAAALRSGAAELIVGALPFDPRRPAALVAPERAAHTAGPWRPAALPELPEVRVVSEIPSAAEHVARVTKLVAQLGDPAQPLRKVVAARSLLATAAAPLEAEVIAGQLVTRHPRAAVYAVDLSPAGRPGEALIGATPEMLISRHGRAVALHPLAGTLPRLADPDADAAQARDLLASSKNREEHAYVIDWIRERLAPVCVELSIPDGPELLSTPEVWHLATPIRGRLRDPATTALDLAVLLHPTPAVCGTPTDLALDAIADLEGDRGFYGGAVGWCDAAGDGDWYVAIRCAELSADARTLRAFGGGGIVAASDPDTELDETTAKLRTFLGGLRCAIPH

SEQ ID NO: 94408 - protein, 376 aa, Nocardioides albidus
  misc_feature (1)..(376): tr|A0A5C4WD86|A0A5C4WD86_9ACTN Isochorismate synthase O S=Nocardioides albidus OX=1517589 GN=FHP29_03630 PE=4 S V=1
MAREPITPAALAARPMLFASGEEAYVARSVRRTWEVADGADHGWADAVVADLEPGERALCALSFAAGAPGIAHFATGSEHALQRPDTEATVERTYEVTEFPTADEYAVMVATALERIASGDIHKVVLGRCLDVVSSPPLVPAEIIDRLLTTRPGRYVFSVPLDASPHGDGPNLVGASPELLVRREGAVISCTPLAGSAPRSDDEAEDLRRAASLQESAKDLAEHAFVVEAIVHALKDVCVEIEYPATPELLSTDTVWHLATPIHARLADPVDGPSALRLAQLLHPTPAVGGVPTAAANAVIADLEGDLRDWFAGCVGWVDRHGDGEFAVTIRAAVMDGPRLRLFAGAGIVAGSDPAAEVRETGAKLATMARVTGLP

SEQ ID NO: 94409 - protein, 381 aa, Nocardioides bacterium
  misc_feature (1)..(381): tr|A0A4S4ZUU4|A0A4S4ZUU4_9ACTN Isochorismate synthase O S=Nocardioides bacterium OX=1565122 GN=E7Z54_19730 PE=4 SV=1
MAREPITPAALAARPLLFASGEEAYVASRVLRTWETPDGADRAWADAIVAALAPGERALAALSFAPGAPGLAHQVIGSEHALRRPAGSRAGAERTYQVTEFPAAEEYAGMVEAALAKIEDGTLRKVVLGRCLDVVSDPPLAPAEIIDRLLVTRPGRYVFSIPLIGADAEDGPDGGPVLLGASPELLVRREGTLITCTPLAGSVPRSEDPAEDDRRARALLDSAKDLAEHAFVVDAIVHALKEVCVEVEHPAAPELLSTDTVWHLASPIRARLAAGEEGLSALHLAQLLHPTPAVGGVPTAAANQVIADLEGDLRDYFAGCVGWVDGEGNGEFAVTIRAAVIDGNRLRLFAGAGIVAGSDPASEVRETGAKLATMSRVTGLP

SEQ ID NO: 94410 - protein, 436 aa, Nocardioides caeni
  misc_feature (1)..(436): tr|A0A4S8N6W1|A0A4S8N6W1_9ACTN Isochorismate synthase O S=Nocardioides caeni OX=574700 GN=E9934_11820 PE=4 SV=1
MDRRDLRRQLGRPLRAHLRPHRHRRLGAHRRGRRSRAARGARRPLRRRVSVGDDPTPITPAALAERPLLFASGELAYVADGVRRTWSTPDGADPGWAEEVRAVLAPGERALVALSFAAGAPGLAHVVTGAERTLRRHPVEAVERRYEVTEFPTPEQYAGMVEAALDKIAAGDLHKVVLGRCLDVVSTPSLVPAEIIDRLLTTRPGRYVFSVPLVAGTADGATPLDGPILVGASPELLVRRSGREISCTPLAGSVPRSDDPTEDARRADGLRDSAKDLAEHAFVVEAIVRALEDVCVEIEHPATPELMSTDTVWHLATPIRARLADGTEGPSALRLAQLLHPTPAVGGVPTAAANAVIADLEGDLRDWFAGCVGWVDAVGDGEFAITIRAAVLDGERLRLFAGAGIVAGSDPAAEVRETGAKLTTMARVTGFTPPGG

SEQ ID NO: 94411 - protein, 464 aa, Nocardioides daphniae
  misc_feature (1)..(464): tr|A0A4P7UG37|A0A4P7UG37_9ACTN Isochorismate synthase O S=Nocardioides daphniae OX=402297 GN=E2C04_15495 PE=4 S V=1
MRQHPRPRGHQLALRPGPGRRPGRGAPVLSRPERARRAGVRCCLVTTHPTPPATPSLVVVTEAVEVAAVEALLDHLPRTEPVTWLRNGEGMVGWGVAARVRTSGSTRFRDADKWWSELCDQAQVRDEVDEPGTGLVAFGSFAFADHPGDSVLTVPSVLLGRRGSVAWRTTVHVAGAPTPADVEVEPVVAPTGVLFSDGALDGETWMGVVADAVDRINAGDLEKVVLARDLIATADAEVDVRAPVAHLATHYPTCWTFHVDGMFGATPEMLVRRERGLVTSRVLAGTIRRTGDDERDLALAATLARSSKDLEEHEYAVRSVADALEPHCSSMNVPESPFVLHLPNVMHLATDVNGVVHDAATVSSLRLAESLHPSAAVGGTPTPVAVALIAEIEGMDRGRYAGPVGWIDADGDGEWGIALRSASVEGAQVRLFAGCGIVGDSAPEAELAESQAKFVPVRDAVTGA

SEQ ID NO: 94412 - protein, 428 aa, Nocardioides dokdonensis
  misc_feature (1)..(428): tr|A0A1A9GG76|A0A1A9GG76_9ACTN Isochorismate synthase D hbC OS=Nocardioides dokdonensis FR1436 OX=1300347 GN=dh bC PE=4 SV=1
MTSSASPGEQSLVDAPLVARTVAVDVARLDALGSLLDLLPAEHPVSWLRRGEGLVGWGRAAWVRTTGTTRFSDATKWWDETTARAVVRDEIEEPGTGLVCFGTFAFADEPGDSVLQVPSVVVGRRGDRAWLTVVGRGTLEPLGDHLSPAEPPAAPVDVTFADGSLNSEQWMSAVADAVRRIGGGDLEKVVLARDLIASTVEDVDVRWPLQRLAAAYPMCWTFHVDGMFGATPEMLVRRERGLVTSRVLAGTIRRTGDDERDLALAATLARSSKDLEEHEYAVRSVADALEPHCSSMNVPETPFVLHLPNVMHLASDVAGVVHDAQTVSSLDLAESLHPSAAVGGTPAHEATALITEIERMDRGRYAGPVGWMDASGDGEWGIALRSGAVEGRTVRLFAGCGIVADSDPEAELAEAQAKFVPVRDSLSD

SEQ ID NO: 94413 - protein, 417 aa, Nocardioides ganghwensis
  misc_feature (1)..(417): tr|A0A4Q2SBZ1|A0A4Q2SBZ1_9ACTN Isochorismate synthase O S=Nocardioides ganghwensis OX=252230 GN=EUA07_15775 PE= 4 SV=1
MTTPASAPSPGPAAPLVVRTVPVDLADLPLLDLLPREQPVSWLRRGEGLVGWGVAARLETSGPTRFSDAVKWWSETVARADVEDHVGEPGTGPVCFGTFAFADEPGDSVLVIPQVVVGRRGDRTWLTTVSVDAPTLAPTPAPAAPVGLVFSDGARNGEEWMSVVAEAVRRIGAGDLEKVVLARDLIATTDEPLDVRWPLRRLASQYEMCWTFHVDGLFGATPEMLVRRERGLVTSRVLAGTIRRTGDDERDLALAATLARSSKDLEEHEYAVRSVADALEPHCSSMNVPEAPFVLHLPNVMHLATDVNGVVHDVATSLQLAESLHPSAAVGGTPTPEATRLIAEIEGMPRDRYAGPVGWMDASGDGEWGIALRSAMVTDRGVRLFAGCGIVASSDPEAELAESQAKFVPVRDALEAD

SEQ ID NO: 94414 - protein, 417 aa, Nocardioides glacieisoli
  misc_feature (1)..(417): tr|A0A4Q2RRF9|A0A4Q2RRF9_9ACTN Isochorismate synthase O S=Nocardioides glacieisoli OX=1168730 GN=EUA06_13230 PE =4 SV=1
MTTPASGSQPGLAAPLVVRTVPVDLADVPLLDLLPEQDHVSWLRRGEGLVGWGVAARLETSGPARFSDAVKWWSETIARADVDDAVGEPGSGPVCFGAFAFADEPGDSVLVIPEVVVGRRGDRTWLTTVSVEAPDLAPAPAPRPPVGLTFSDGARNGEEWMTVVADAVSRIASGELEKVVLARDLIATTDEPLDVRWPLHRLAESYEMCWTFHVDGLFGATPEMLVRRERGLVTSRVLAGTIRRTGDDERDLALAATLARSSKDLEEHEYAVRSVADALEPHCSSMNVPEAPFVLHLPNVMHLATDVNGVVHDLASSLQLAESLHPSAAVGGTPTSAATALIHDIEGMPRDRYAGPVGWMDASGDGEWGIALRSAQVTDSGARLFAGCGIVASSDPEAELAESQAKFVPVRDALEGA

SEQ ID NO: 94415 - protein, 366 aa, Nocardioides immobilis
  misc_feature (1)..(366): tr|A0A417Y3D8|A0A417Y3D8_9ACTN Isochorismate synthase O S=Nocardioides immobilis OX=2049295 GN=D0Z08_10495 PE=4 SV=1
MALPARPLLFASGEEAYVADRVLRTWITPDGADPGWADQVVAALEPGERAIGALSFAAGAPGILHQVVGSERPLHRPASPPRARTYDVHEFPTPAAYADMVRAVLDKIAAGVVRKVVIGRCLDVISDPPLEPAEIIDRLLVTRPGRYVFSVPLTEGLEDGPLLVGASPELLVSREGDRIACTPLAGSVPRSPGPDEDARRADALRASAKDLAEHAFVVDAIVHALKEVCVDVEPPTGPTLLATDTVWHLASPITARLEDPDSGPSALRLAQMLHPTPAVGGVPAKAAAEAIADLEGDLRDYFAGCVGWVDESGDGVFAITIRAAVIDGARMRLFAGAGIVAGSDPDSEVRETGAKLETMTRVAGLG

SEQ ID NO: 94416 - protein, 422 aa, Nocardioides iriomotensis
  misc_feature (1)..(422): tr|A0A4Q5J821|A0A4Q5J821_9ACTN Isochorismate synthase O S=Nocardioides iriomotensis OX=715784 GN=ETU37_02590 PE =4 SV=1
MTQPQVSADPLVVRTVPLDDPGDLLALLPGSATTPDVTAWVRNGDGLVGWGAAAVLRPAGADRFAQARAWWVDQVGTAVVRDEVRLPGTGLVCFGSFAFADETGDSVLVVPEVVVGRRGGRAWVTTTSAGALTTTPEVAPVEPPAPPSNVTFSDGAMSGAGWESVVAEAVRRINAGDLEKVVLARDLVATASEDVDVRWPLHRLSESYPMCWTFHVDGLFGATPEMLVRRERGLVTSRVLAGTIRRTGDDERDLALAATLARSSKDLEEHEYAVRSVADALAPHCTSMNVPEAPFVLHLPNVMHLATDVAGVTHETDDVASSLTLAEALHPSAAVGGTPTSVARELISEIEGMDRGRYAGPVGWMDAAGDGEWGIALRSAEIDGARVRLFAGCGIVADSDPAAELAEAQAKFVPVRDALAGR

SEQ ID NO: 94417 - protein, 419 aa, Nocardioides oleivorans
  misc_feature (1)..(419): tr|A0A4Q2RZV3|A0A4Q2RZV3_9ACTN Isochorismate synthase O S=Nocardioides oleivorans OX=273676 GN=EUA93_03790 PE=4 SV=1
MTPPSSAPQAGQAAPLVVRTIPVDQADLPLLDLLPQQDPVSWLRRGEGLVGWGVAARLETSGPTRFSDAVKWWSETVARADVEDHVGEPGTGLVCFGAFAFADEPGDSVLVIPQVVVGRRGDRTWLTTVSVDAPDLAPTDRPSPPVGLVFSDGARNGEEWMSVVADAVDRIAAGDLEKVVLARDLIATTDEPLDVRWPLRRLAESYEMCWTFHVDGLFGATPEMLVRRERGLVTSRVLAGTIRRTGDDERDLALAATLARSSKDLEEHEYAVRSVADALEPHCSSMSVPEAPFVLHLPNVMHLATDVNGVVHDLATSLQLAESLHPSAAVGGTPTPVATRLISEIEGMARDRYAGPVGWMDGDGDGEWGIALRSAMVTEDGVRLFAGCGIVASSDPEAELAESQAKFVPVRDALGADTP

SEQ ID NO: 94418 - protein, 380 aa, Nocardioides simplex
  misc_feature (1)..(380): tr|A0A0C5XCX7|A0A0C5XCX7_NOCSI Isochorismate synthase D hbC OS=Nocardioides simplex OX=2045 GN=dhbC PE=4 SV=1
MARDPITPAALATRPMLFASGEEAYVASAVRRTVETPDGADPAWADGVVAALEPGERALCALSFAAGAPALAHLVVGSEHALQRPPHDASVQRTYEVTEFPTADAYAGMVEAALAKIATGALHKVVLGRCLDVVSTPPLVPAEIIDRLLTTRPGRYVFSVPLVPGTDAGPPSDGPILVGASPELLVRREGLSISCTPLAGSVPRSADPDEDARRAEGLRQSAKDLAEHAFVVEAIVHALKEVCVEIEYPATPELLSTDTVWHLATPIRARLADGVDGPSALRLAQLLHPTPAVGGVPTAAANAVIADLEGDLRDWFAGCVGWVDGRGDGEFAVTIRAAVMDGPRLRLFAGAGIVAGSEPASEVRETGAKLATMARVTGLP

SEQ ID NO: 94419 - protein, 417 aa, Nocardioides sp.
  misc_feature (1)..(417): tr|A0A4Z1CIQ6|A0A4Z1CIQ6_9ACTN Isochorismate synthase O S=Nocardioides sp. MMS17-SY213 OX=2518372 GN=EXE59_0095 0 PE=4 SV=1
MTTPASAPSTGPAAPLVVRTVPVDLADLPLLDLLPREQPVSWLRRGEGLVGWGVAARLETSGPTRFSDAVKWWSETVARAGVEDHVGEPGTGPVCFGTFAFADEPGDSVLVIPEVVVGRRGDRTWLTTVSVDAPTLAPTPDPAAPVGLVFSDGARNGEEWMSVVAEAVRRIGAGDLEKVVLARDLIATTDEPLDVRWPLHRLASQYEMCWTFHVDGLFGATPEMLVRRERGLVTSRVLAGTIRRTGDDERDLALAATLARSSKDLEEHEYAVRSVADALEPHCSSMNVPEAPFVLHLPNVMHLATDVNGVVHDVATSLQLAESLHPSAAVGGTPTPEATRLIAEIEGMPRDRYAGPVGWMDASGDGEWGIALRSAMVTDGGVRLFAGCGIVASSDPEAELAESQAKFVPVRDALEAG

SEQ ID NO: 94420 - protein, 419 aa, Nocardiopsaceae bacterium
  misc_feature (1)..(419): tr|A0A3N0E264|A0A3N0E264_9ACTN Isochorismate synthase O S=Nocardiopsaceae bacterium YIM 96095 OX=2487137 GN=EFW 17_21000 PE=4 SV=1
MTVASEAPRLIVRTVALRDHHELLGHLPETAPLAWLHNGDGLVGWGEAARLDLPAENEPNGQRFDTAARWMSELAAAADVEDAVGLPGTGPVAFGGFTFDPRSPGSTLVVPRVVVGSRAGRVWLTTICDHPGSHPDALLSSVTSTRYIGPLTWSDGSLSAQGWGGAVAAAVRRIRAAELHKVVLARDIHAEAGGTIDVRTLLSRLARAYPNCYTFCVDGLVGATPELLLRRAGGDVTSLVLAGTRPRGSTSEEDERIAGDLLASAKETEEHRYAVESLRTALTPLTSSVRLPDHPELLRLSNVQHLASPASATLREGVSTFDVIAAMHPTAAVGGTPARVAMDVIRELEGMDRGRYAGPVGWLDTRGDGEWGIALRCAHVEGSRARLFAGCGIVAGSDPEAEIAEADSKFRAMRSALAD

SEQ ID NO: 94421 - protein, 427 aa, Nocardiopsis alba
  misc_feature (1)..(427): tr|J7KXY9|J7KXY9_NOCAA Isochorismate synthase family pr otein OS=Nocardiopsis alba (strain ATCC BAA-2165 / BE74 ) OX=1205910 GN=B005_5227 PE=4 SV=1
MNAALTPPKLFVRTVPLRDRADGLVRRLPEGAPLAWLTGDEGIVGWGEAARFDPEPSPEGTPPTDITRFTTAARRFTELLEHAEVEDEVGLPGTGPVAFGTFAFAPTSGGSALIVPRVIVGRREGRSWLTTITDAPGDHPRELLWPVTEPRPVGPVDWRPGSLTDTAWMDTVASTVARIRSGELDKAVLARDAHAEAHSPIDVRVLLERLRTRFPGCFTFSVAGMVGATPELLLRLEGDEFTSLVLAGTRPRGVDEEDDHRLGREMMSSAKDVEEHGLAVDSLRAAMEPLTEELTVPAWPHLLKLANVQHLATRAHARMSPGVGALEAVAALHPTAAVGGTPTETAMRLIAEVEGMDRGGYAGPVGWVDGAGNAEWGIALRGAHVEGSRARLYAGCGIVAGSDPASELAETESKFRVMREALTDPET

SEQ ID NO: 94422 - protein, 387 aa, Nocardiopsis sp.
  misc_feature (1)..(387): tr|A0A1R3UKQ9|A0A1R3UKQ9_9ACTN Isochorismate synthase o f siderophore biosynthesis OS=Nocardiopsis sp. JB363 OX =1434837 GN=BQ8420_03485 PE=4 SV=1
MPDQRTAAPAASAGELLSAYRPGDAFFSTATGVLHGTGALHTLDRLDDLSAALADAGPDAVAMGALPFDTSGPAHLVVPETVRRAPSPTEGPAPENRWRPLGEGWRLTPVPEPEAHVAAVERAVKLMAEDADLRKVVLARSLRVEGDEPIDVATVLANLLWRDPTAFVFATDLPERGSGTRTLIGASPELLVAKRGRDVLSNPLAGSAPRSADPTKDQRNAVDLLTSAKDRHEHAVVVDAVTESLRPFCRTLSVPTEPELVKTATMWHLSTRVNGELTDPDVPVHTLAAALHPTPAICGTPTGRAFDTITDLEPFDRGFYTGAVGHSDAHGDGAWVVTIRCADVAGSTVDLFAGGGVMPESDPEAELAETSAKLRTLLLALGVNGTV

SEQ ID NO: 94423 - protein, 471 aa, Nodularia spumigena
  misc_feature (1)..(471): tr|W6FWZ3|W6FWZ3_NODSP Isochorismate synthase Menaquino ne-specific isochorismate synthase OS=Nodularia spumige na CCY9414 OX=313624 GN=NSP_48180 PE=4 SV=1
MTVLPCRSNFFVKNKDLYHFLLNVQENCRNHNCRQIVSISLDIDWVDPLVVLDKLTQANDINFYFENQAQGEAIAAIDSVTKLEIDGKDRFHQAEYFIKSCLKNIINFGNNQPTFAEPHFFCYFSFFDYNSQIDYPFPSATVFLPRWQISVKNKRCILVNNIIIKASTNVENILQNLQDKIVQIQSLEYTSANLEQLPTKFSKQSVTNAQDFKRAVGSAVEKIRSSHLSKIVLANALDVKSNHNFNLFKSLNNLRQIHPNCYIFSTSNGKGQNFIGASPERLISINNQELISDALAGSAPRGKTPAEDAANANRLLNSIKERHEHSLVIDFITQRLTQLGLLPQVLAPRLRQLSNIQHLWTPITATVPANVHPLKIVSQLHPTPAVAGATRDFACAEIRRYESFERGLYAAPLGWVDARGNCEFIVGIRSALIDGDRARLYAGAGIVAGSDPEKEFAEVQLKLQALLKALV

SEQ ID NO: 94424 - protein, 300 aa, Nonlabens dokdonensis
  misc_feature (1)..(300): tr|L7WEY7|L7WEY7_NONDD Isochorismate synthase OS=Nonlab ens dokdonensis (strain DSM 17205 / KCTC 12402 / DSW-6) OX=592029 GN=DDD_3389 PE=4 SV=1
MTYGVFSKFENSEDQVFIPSEEYKEFKFKNSSNTSSKLLNATHLIDEKEKLRYANMVRKTVDMLKESTVQKVVLSRVESFTKRSSDLEILEALLNEYPAANCYFFHHPKVGKWMGATPEILAVIKGENLQTMSLAGTAVFNPNQDHVWGEKEIEEQKLVTDFIVENLKAKGVSHIKKSLVQTAQAGTLVHLKTDINALIDPSRKEDYIEALHPTPAVCGLPRDAAQKFIKDNEGYDRSFYTGYLGIVEEREASYYVNLRCMQLLDDEAYLYVGGGITAKSDPILEYEETVQKLFTMKSLL

SEQ ID NO: 94425 - protein, 345 aa, Nonlabens sediminis
  misc_feature (1)..(345): tr|A0A090Q3T7|A0A090Q3T7_9FLAO Isochorismate synthase O S=Nonlabens sediminis OX=319236 GN=JCM19294_191 PE=4 SV =1
MNSPFLHQVSQLLAQELPFFVLKKSNENRVNLFYQSDQEWHRTTPLEEDYIVFAPFLKEQHSVYIPVENSISFPWTHQKVESTLPEFDKEVNKDEYLMLVNKAINNLQEGDLRKVVLSRKQTIKSHLSQVKLLERLLNLYPTANSYFFYHPKVGAWMGATPELLLKIENTTLKTMSLAGTVAYDGVTDIYWGKKEREEQQLVTDYIVEQLKMTNATDIETSQPQTVQAGAICHLKTDIKAQINPNDMYKYLNALHPTPAVCGMPTKQALQFIKENEGYDRSFYTGYLGVVNNNNKNAEFFVNLRCIELNDKTATLYVGGGITALSHAQAEYLEIVNKMGTMLRVL

SEQ ID NO: 94426 - protein, 345 aa, Nonlabens sp.
  misc_feature (1)..(345): tr|A0A3S9MZH3|A0A3S9MZH3_9FLAO Isochorismate synthase O S=Nonlabens sp. MJ115 OX=2496866 GN=EJ995_10540 PE=4 SV =1
MRENLLSYTQELLEQDLPFLLLRQQGEPRVKILSQNDKKLHKTATDTMSYAVFSKFQNTENQIIIRGDVIQEFRWSLSGVIDTSTTVKLDVEDKHSHIKLVNRAVQHIQNSELQKVVLSRKVTVQQESSIMDILSRLLDNYPDANCYLFHHPAVGTWLGATPEILLSYKDGMVKTMSLAGTMSAQNKEAVQWTIKEQEEQELVTRFISSQLSKVTDQIETSKVETIKAGELYHLKTDITARVRNEDLDKCLALLHPTPAVCGVPRDLALDFIRDHENYDRSFYTGYLGIVQPKGQEAKYFVNLRCMKIEANQISLYAGGGITAMSDPIAEYQETENKLRIMSRLL

SEQ ID NO: 94427 - protein, 359 aa, Nonlabens ulvanivorans
  misc_feature (1)..(359): tr|A0A090PNV9|A0A090PNV9_NONUL Isochorismate synthase O S=Nonlabens ulvanivorans OX=906888 GN=JCM19297_2563 PE= 4 SV=1
MREKLFQYLSFLLEQNLPFLALKAADSNEVKVVAQNDQTWYKTAPDNVAYAVFSKFQNNENQVYIAGEKILNFKCEVSVSQPKINQSIIPEDGKVAYLELFKKAMVRLEKKQLSKVVLSRKQEFAIRDSDIDIYERLIDTYPTANCYFFYHPQVGKWMGATPELLMNVQSDGLHSTQSRTDAIPVKVSTMSLAGTAVDDGGLNHEWGGNKEIEEQQLVTDFIIAQFNESGAIDMKQSPVQTVKAGHLIHLRTILQARSSSNQIKNLLNALHPTPAVCGLPRNESMQFIINNESYDRSYYTGYLGIVDGASHHYYVNLRCMQLLDRTAVIYVGGGVTAKSDAMLEYQETRSKLQTMHRLL

SEQ ID NO: 94428 - protein, 358 aa, Nonomuraea gerenzanensis
  misc_feature (1)..(358): tr|A0A1M4EFK7|A0A1M4EFK7_9ACTN Menaquinone-specific iso chorismate synthase OS=Nonomuraea gerenzanensis OX=9394 4 GN=BN4615_P7080 PE=4 SV=1
MAVPPGPGRFAWARQWLATVLGDAQVHDDVRTPGSGAVAFGSFTFDEDAHGSVLVVPRALLARRDGHAWLTTIGDAPLETFTPVRDPGRISYGDGSLTAPEWEHVVARAARRIREGELEKVVLARDLVATAERPIDVRLLLSRLAARYPECYTFSVAGLVGATPELLIRRTGQEIESLVLAGTAARGTSAADDLARGAALLASAKDRHEHECAIASVRETLSPLCSALTTPDEPELLMLPNVQHLASHVTGRLADGASVLDVVAAMHPTAAVGGTPTKTAIQVIRELEGMDRAGYAGPVGWIDANGDGEWGIALRSGLVQGRRARLFAGGGIMGDSDPAAELAEAQAKFRVMQYALEG

SEQ ID NO: 94429 - protein, 409 aa, Nonomuraea sp.
  misc_feature (1)..(409): tr|A0A5D0QCM6|A0A5D0QCM6_9ACTN Isochorismate synthase O S=Nonomuraea sp. PA05 OX=2604466 GN=FXF51_17110 PE=4 SV =1
MSVALGTTRPLPVRTTPVGDPGDLLASLPRTAPYAWIRNGEGLVGWGEAARVAVPPGPGRFAWAREWLATVLGDAQVRDDVRTPGSGAVAFGSFTFDEDAHGSVLVVPRAVLARRDGHAWLTTVGDAPLETFTPVRDPGRISYGDGSLTAPEWQGVVARAARRIREGELEKVVLARDLVATTERPIDVRLLLSRLAARYPECYTFSVAGLVGATPELLIRRTGQEIESLVLAGTTARGTGAADDLARGAALFASAKDRHEHECAIASVRQTLAPLCSSLTTPDEPELLVLPNVQHLASHVTGRLADGASVLDVVAAMHPTAAVGGTPTKTAIQVIRELEGMDRAGYAGPVGWIDANGDGEWGIALRSGQVQGRRARLFAGGGIMGDSDPAAELAEAQAKFRVMQYALEG

SEQ ID NO: 94430 - protein, 471 aa, Nostoc punctiforme
  misc_feature (1)..(471): tr|B2IZ87|B2IZ87_NOSP7 Isochorismate synthase OS=Nostoc punctiforme (strain ATCC 29133 / PCC 73102) OX=63737 G N=Npun_F6461 PE=4 SV=1
MTVSPCRNNLFVERKDLYQFLLLVQEKCLQNNDKQIVSISQEIDLVDPLLVLDRLTQANEINFYFEDRAKGEAIAAIDSVAKLQIDGADRFAQAEYFIKSCLKNIINFSNANQPFSGPHFFSYFSFFDKNIQVDYPFPSATIFLPRWQVAVKNQRCILVTNIILNENTNIQRLLENVQNKIEFIQSLEYYSPNIDSFPKNLYKKSVTNATQFKRSVVSVLEKIRSSHLSKIVLADILDVKSSNHFDLIKSLNNLRQIHPNCYIFSTSNGKGQNFIGASPERLISINNQQLITDALAGSAPRGKTPTEDAANANRLLNSEKEKHEHSLVLNFITQRLSELGLSPQILAPRLRQLSNIQHLWTPISAIVPANIHPLKIVGQLHPTPAVAGAAQDVACAEIRRYESFERGLYAAPLGWIDSQGNCEFIVGIRSALINGDRARLYAGAGIVAGSDPDKEFAEVQLKLQALLKALV

SEQ ID NO: 94431 - protein, 471 aa, Nostoc sp.
  misc_feature (1)..(471): tr|K9Q806|K9Q806_9NOSO Isochorismate synthase OS=Nostoc sp. PCC 7107 OX=317936 GN=Nos7107_0581 PE=4 SV=1
MTVSPCRNNFFVTHKDIYQFLSAVHENCLNNNCRQIVSISLEIDWVDPLVVLAKLAQANEINFYFENRGKGEAIAAIDTVAKLQIDGQDRFNQAEYFIKNCLKNIIYFGDIHQHFASTRFFCYFSFFNQNIQSDYPFPSATIFLPRWQIAVKNQRCILVANILITANANLEKIWHNLWSKIELINSLEYFSPKLDFLSTHFSKQSVTQGTEFKRSVVSALQKIQASHLSKIVLADALDVRANHQFDLYKSLDNLRQIHPNCYVFSTSNGKGQNFIGASPERLICIQNQQLITDALAGSAPRGKTPEEDAANANRLLNSEKERHEHSLVIDFITQRLSQLGLSPQVLPPRLRQLSNIQHLWTPISAIVPANVHPLKIVAQLHPTPAVAGAARDVACAEIRRYESFERGLYAAPLGWIDSQGNCEFIVGIRSALIDGDRARLYAGAGIVAGSDPDKEFAEVQLKLQALLKALV

SEQ ID NO: 94432 - protein, 387 aa, Notoacmeibacter sp.
  misc_feature (1)..(387): tr|A0A3L7JFI5|A0A3L7JFI5_9RHIZ Isochorismate synthase O S=Notoacmeibacter sp. M2BS9Y-3-1 OX=2448481 GN=D8780_10 385 PE=4 SV=1
MTVETNTARTLDEKDALFAFQSRHHAFRGLGRAAMLPRGNASTISERSGAFFAKAGAEAILAGALPFDRGGDDYLWQAEQVVPARSWALPRPAPPLRWNLRAEPDAAEYAKAVGNALRIMAADTDGSDRLTKIVLARSLLATADHDIDVEALFGKLATDPAVTAFLVPLPEKDGRPRLMAGATPELLLEKTGTQIVSHPLAGSAKRHDELARDAEAAAALNRSVKDRSEHAIVVEFILDMLAPYCSDLRRPDGMTVTSTRSMWHLGTRIEGELKNPDVPAVVLASALHPTPAVCGLPRDRCTRLIRDLEPAERDFYAGSVGWCDGKGDGAWYVTIRCAEICGAQARLFAGAGIVPQSDPVAEAAETGAKFNAMLNALGIDPSLEAFS

SEQ ID NO: 94433 - protein, 441 aa, Obesumbacterium proteus
  misc_feature (1)..(441): tr|A0A4Q9D2S6|A0A4Q9D2S6_9GAMM Isochorismate synthase M enF OS=Obesumbacterium proteus OX=82983 GN=menF PE=3 SV =1
MVHLSVLVERIIPLLRQAAAEQSGLVRIALPCSLKDGTQMLEWLASQPLFPQFYWRHRDGAEEAAVCGAVRTFTDAEQAQKFVQENGCPELRIWGLNAFGQVELDGYGTINSLLFLPRIALMRHAGKAELVVYLYGEASLKQDLELALRDLAALCAIQPLPILHTDVLAAHHQPDHDAWCDLLNNALAEIEHKAFEKVVLARRTTLKLSLPLRAAQFLAASRAVNHRCYHFMLALAPERAFLGSSPERLYRRQNLSLETEALAGTVASGNSDAQAQENAQWLMSDRKNQHENLLVVDDICQRLQGGAQALDVMPAEIIRLRKVQHLRRPIHATLVQSNDADCLRRLQPTAAVAGLPREPARQFIMQDEPFDRGWYAGSAGYLSQDQAEFAVALRSALIEHDHIHLYAGAGIVAGSDPEQEWLEIENKAAGLRTLLESDISL

SEQ ID NO: 94434 - protein, 461 aa, Oceanobacillus arenosus
  misc_feature (1)..(461): tr|A0A3D8PRH5|A0A3D8PRH5_9BACI Isochorismate synthase M enF OS=Oceanobacillus arenosus OX=1229153 GN=menF PE=3 SV=1
MIEIKEVQVEALFEKVIQGLQNNENARLVSITKKIQTTDALEFYEQARFMGKNRTFWTNSNRSLFLVGIGEAYEIVANQSRFKETKQQWDHLLEQAVIHNPYQLPGTGVIALGGMSFDPKKNTTELWKHFKPSQFMIPEFQLANYQDESYFTMNVFVKKDDHPGQLAAATRQLEAKLLQPNHLEAEALTIDKRVEIDPEGWKESVRTATSEIRNKKAEKIVLAREVRLTFNKKAESGAIINKLLDTQANSYIFAFEKLEDCFIGATPERLVKVEQDQLLSTCLAGTAPRGETKAEDDRISNELLHDEKNRQEHDFVVQMIKRSIKDYCTDLVIPDVPVVYPLKNLQHLYTPVTAKLKAGYSIFDIIEQLHPTPALGGTPREESLAFIRENEALDRGWYGAPVGWLDSNQNGEFAVAIRSALIHGDSASLFAGCGVVKNSDPEEEYEETNIKLMPMLSVLGG

SEQ ID NO: 94435 - protein, 464 aa, Oceanobacillus bengalensis
  misc_feature (1)..(464): tr|A0A494YWB6|A0A494YWB6_9BACI Isochorismate synthase M enF OS=Oceanobacillus bengalensis OX=1435466 GN=menF PE =3 SV=1
MIDLKHEQVEALLEKSIYGLNNDDFQLVSYTKRINTVNPFQFFEAAKQTEKNRIFWMSSNKEFYLVGIGCASEMMSEKSETRFNETKDKWNNVLNKAVIHNGYEVPGTGIVALGGMSFDPEKQTTTLWENYKASHFVIPEYMLTVYRDTCYLTVNVKVTKNDHPTQLANEIKDMESTLCHETIIEDEILSIINKEEIDALQWKETVRKATDEIKKASADKIVLAREMRLTFNRRANIGLILQNLLESQPNSYIFAFEQGEDCFVGATPERLVKLENARLFSTCLAGTAPRGKTPEEDSVIRYELLHDEKNLEEHQFVVQMIKAAMEDYCTDLKIPSEPVIYPLRNLQHLYTPVTGILKKGFSIFDIIEKLHPTPALGGSPKDKSLVFIRENEVLDRGWYGAPVGWMDSNNNGEFAVAIRSALVQGDEASLFAGCGVVKDSIPEQEYEETNMKFLPMLSVLGGQA

SEQ ID NO: 94436 - protein, 461 aa, Oceanobacillus caeni
  misc_feature (1)..(461): tr|A0A0N0M7C9|A0A0N0M7C9_9BACI Isochorismate synthase M enF OS=Oceanobacillus caeni OX=405946 GN=menF PE=3 SV=1
MIELKEEQVETILEKAIEGINSDDDYQLVSMTKKIKYNNALSFFEAAKYIKKNRTFWMSSEEDFYLVGIGQAYEIIAEESRFEETKKAWNQLLEKATIYNPYEQPGTGIVALGGLSFDPKKPTTPLWENFKPSHFTVPEFLMTKHNRECYLTVNILVRKNDHPRQLANEWRDLENSLFQKASIEKQMLTITEKKEIEPTEWKETVRKAKEKINHSDIEKIVLAREMYLRFNENANIGSILQKLLDTHPSSYIFAIEKDEDCFLGATPERLVKLEKDHLLSTCLAGTAPRGKTKEEDQAISEGLLHDQKNREEHDFVVKMIKNAIKDCCTHLDVPNEPIIYPLTNLQHLYTPVTATLKKEYSLFDIIEKLHPTPALGGTPKEASLQFIREYERLDRGWYGAPIGWLDSNQNGEFAVAIRSALIKDTEASLFAGCGVVKDSNPDEEYEETNIKFLPMLSVLGG

SEQ ID NO: 94437 - protein, 461 aa, Oceanobacillus chungangensis
  misc_feature (1)..(461): tr|A0A3D8PXW1|A0A3D8PXW1_9BACI Isochorismate synthase M enF OS=Oceanobacillus chungangensis OX=1229152 GN=menF PE=3 SV=1
MIEIKEGQVEALFEKVIQGLQNNEDARLVSITKKIQPIDALEFYQRASYMGKNRTYWTNSNRSLYLVGVGETFEITAAQSRFKETKQKWDKLLEQAVIHNPYKLPGTGVTALGGMSFDPKKETTELWKHFKPSQFTIPEFQLTIYQGESYYTINVLINKDDHSGQLAASIQRMEETLFQTIQVEPESLTIEKKVEINPERWKETVRAATSEILNKKVEKIVLAREVRLSFDKQVKSSVVIDKLLDTQANSYIFAFEKNNHCFIGATPERLVKVEQDNLLSTCLAGTAPRGETREEDERISEELLHDQKNREEHDFVVQMIKQAIKDHCTDLVIPDEPVVYPLKNLQHLYTPVTAKLKEGYSIFDIIEQLHPTPALGGTPREESLAFIRENELLDRGWYGAPVGWLDSNQNGEFAVAIRSGLIHGDTASLFAGCGVVKDSDPEAEYEETNIKLMPMLSVLGG

SEQ ID NO: 94438 - protein, 462 aa, Oceanobacillus halophilus
  misc_feature (1)..(462): tr|A0A494ZU98|A0A494ZU98_9BACI Isochorismate synthase M enF OS=Oceanobacillus halophilus OX=930130 GN=menF PE=3 SV=1
MIEIKHRQVEELIEKAIQKISKDEEYRLVSITNKIENFDALQFFEGAKHIEKSRTFWTNSDKDFYLVGIGQVYEILAEESRFTGTKKAWRDILSKALIYNPYESPGTGIVALGGMAFDPKKEPSAIWSNYKQSHFTIPEFLLSVNKDDCYFTVNIQVRKDDLPTQLANEIERVERILFAHSELEIQDLTIQFKNEIAPFEWKNTVKKATEEICQGKAEKIVLAREIRLKFNERASITSVLRKLLETQPNSYIFAFEKGNDCFIGATPERLVKREKEHLLSTCLAGTAPRGKTAEEDKQIGKELLHDPKNRKEHDFVVQMIKQAMEDYCTDLEVPNNPVIYPLRNLQHLYTPVTATLKQGYSIFDIIENLHPTPALGGTPTEESLAFIREHEHMDRGWYGAPIGWLDSNQNGEFAVAIRSALVQGEEASLFAGCGVVKDSDPEAEYEETNIKFLPMLSVLGGQ

SEQ ID NO: 94439 - protein, 462 aa, Oceanobacillus iheyensis
  misc_feature (1)..(462): tr|A0A2P1WLG6|A0A2P1WLG6_9BACI Isochorismate synthase M enF OS=Oceanobacillus iheyensis OX=182710 GN=menF PE=3 SV=1
MIELKEENIEAVFQEAIDMIQPQNSRLVSITKRVEAIDPLSFYDAAKQLRTERLYWSSTAEAYTLVGTGCAFEITAIKDRFETAEQEWHNLLNDAVSNNPYDVPGTGIVSMGGAAFDPEKEKTKLWANFEPIRFTVPEYLLTEYENDFYFTMNIMVRADDHPRQLANQLREMEGQLLNGTPRYESDTQIVGRHEISPEKWKQTVKLATEEIRQQKVEKIVLAREVRLKLDREADSGNILRKLLNTQSNSFIFSFERGKDCFIGATPERLVKIRQNSLFSTCLAGTAPRGETEEEDARISHNLFHDQKNRGEHDFVVQMMKKAIENYCTDIEIPNEPVVYPLKNLQHLYTPVTARMKKDYTILDIIKKLHPTPALGGTPRKESVAFIRKHELLDRGWYGAPVGWLDNRDNGEFAVAIRSGLLQGDEASLFAGCGVVKDSDPEEEYEETNIKLTPMLSVLGGAE

SEQ ID NO: 94440 - protein, 461 aa, Oceanobacillus limi
  misc_feature (1)..(461): tr|A0A1I0DN58|A0A1I0DN58_9BACI Isochorismate synthase M enF OS=Oceanobacillus limi OX=930131 GN=menF PE=3 SV=1
MLKVKEDILRSLLDKAIQTIHTNEIKLVSYTKQIDEANPLAFFEAGKYMQGNRTFWKSSIDDYFIVGVGSALELATDNSTITYIENKWQNLLQDAFIHNPYETPGTGIVALGGMAFDPKKERTELWKEFNSSQFTIPAFTLTKYNNNYYLTTNVQVTANDHPEQLFNQLKDKEEQLIVESVDFPENTSVVSKDEIQPEVWKQTVKHATEQIKKHVADKIVLAREVRLELSKKAEPTAVLDQLAQTQPNSYIFAFDHGEGCFIGATPERLVKLEESQLLSTCLAGTAPRGETLEEDEKYKITLFNDQKNREEHDFVVQMIKNSMEDYCDNIDVPNEPSILQLRNLQHLYTPVRAKIKDGFSIFDVIDKLHPTPALGGTPREASLQFIRENEQLDRGWYGAPIGWLDSNQNGEFAVAIRSGLIQGKHASLFAGCGIVKDSDPEAEYEETTIKLLPMLSVLGGA

SEQ ID NO: 94441 - protein, 466 aa, Oceanobacillus oncorhynchi
  misc_feature (1)..(466): tr|A0A0A1MPE7|A0A0A1MPE7_9BACI Isochorismate synthase M enF OS=Oceanobacillus oncorhynchi OX=545501 GN=pchA PE= 3 SV=1
MIEVKEKQFTAELEAAIQSVHTDQKNKLFSYTEKINPVNLYRFLEKAADLKLPRTFWSSANEDFQMAGAGHAFELSAKDSPSRYEQVEQEWHALLSDAVIYNPYHVSGTGVVALGGFSFDPLKPQTKLWENFPCSHFSIPNYILTHAEGNYYLTLNRFICTDETYAGVLEQLQDHRQTLLNNAENKRDGYVLHIQRKTEIDPEQWKETIKKATDVMKNTAVDKIVLAREVRLHFNQSANIPDILKRLVDTQPNTYVFGYEMGEDCFLGATPERLVKVKDDEVLSTCLAGTAPRGETMEEDEQIADNLFRDPKNREEHDYVVQMIRNTMEAYCTDVNVPFEPAVHQYKTLQHLYTPVRAKLKKNHRIFSIISGLHPTPALGGTPRQEALAFIRENELLDRGWYGAPIGWMDSNNHGEFAVALRSALIQKDEASLFAGCGIVEDSIPESEYEETNIKLMPMLSVLGVD

SEQ ID NO: 94442 - protein, 462 aa, Oceanobacillus picturae
  misc_feature (1)..(462): tr|A0A0U9H147|A0A0U9H147_9BACI Isochorismate synthase M enF OS=Oceanobacillus picturae OX=171693 GN=menF PE=3 S V=1
MIELKEENIEGVFQEAIDTIHPQNSRLVSITKRVEAIDPLSFYDAAKQLRTERLYWSSTAEAYTLVGTGCAFEITAIKDRFETAEQEWNNLLNDAVSNNPYDVPGTGIVSMGGAAFDPEKEKTKLWANFEPIRFTVPEYLLTEYENDFYFTMNIMVRADDHPRQLANQLREMEGQLLNGTPRYESDTQIVGRHEISPEKWKQTVKLATEEIRQQKVEKIVLAREVRLKLDREADSGNILRKLLNTQSNSFIFSFERGKDCFIGATPERLVKIRQNSLFSTCLAGTAPRGETEEEDARISHNLFHDQKNRGEHDFVVQMMKKAIENYCTDIEIPNEPVVYPLKNLQHLYTPVTARMKKDYTILDIIKNLHPTPALGGTPRKESVAFIRKHELLDRGWYGAPVGWLDNRDNGEFAVAIRSGLLQGDEASLFAGCGVVKDSDPEEEYEETNIKLTPMLSVLGGAE

SEQ ID NO: 94443 - protein, 461 aa, Oceanobacillus profundus
  misc_feature (1)..(461): tr|A0A417YMU9|A0A417YMU9_9BACI Isochorismate synthase M enF OS=Oceanobacillus profundus OX=372463 GN=menF PE=3 SV=1
MIEIKEDQLASLLNGAIEQLQAEDDRRLVSFTKKIATTNPLQFFEAAKHIFENRTFWTSSSQMLWLTGVGNAFEMGADKSRFEVIEAAWNKMLNEAYIHNPYEVPGTGIVALGGMSFDPINAQTELWKKFRPSQFRVPEFLLTKYNSSYYLTINVCVRKNDHAKQLAEELRQIEQKLLLGQKVPDDILHIVDESEMDPEKWMDIVRQATDEIRNQHVEKIVLARELRLTFNRHAEISSILNNLLKTQPNSYIFAYEIGDDCFVGATPERLVKVEKNKLLSTCLAGTAPRGKTEEEDMKISEALLNDEKNRQEHDFVVQMIKHGIKDYCTEMTIPEVPVVRPFKNLQHLYTPVTAQLRDGFTILDIIKQLHPTPALGGSPKAESLAFIREHELLDRGWYGAPIGWMDSSNNGEFAVAIRSALIQKNQASLFAGCGVVKDSDPQSEYEETKIKLLPMLTVLGG

SEQ ID NO: 94444 - protein, 466 aa, Oceanobacillus sojae
  misc_feature (1)..(466): tr|A0A511ZMJ9|A0A511ZMJ9_9BACI Isochorismate synthase M enF OS=Oceanobacillus sojae OX=582851 GN=menF PE=3 SV=1
MIEVKEKQFTVELEAAIQSIHTDQKDKLFSYTEKINQVNLYRFLEKAGVLKLPRTFWSSADEIFQLAGAGHAFELTAEISKYRYDQVEQKWNALLDDAVIYNPYHTSGTGVVALGGFSFDPLKPQTKLWGNFPESHFSIPSYILTYTDGNYYLTINRFIRAGESYSSVLEELQNNRQALMDNTDSPHNASVLRVQSKQEIAPDLWKETIKKATDVMKKTAVDKIVLAREVRLHFNQSANIPDILQRLVCTQPNSYVFGYEMGEDCFLGATPERLVKVKDDEVLSTCLAGTAPRGETIEEDEQIANNLFQDPKNREEHDYVVQMIRSTMEAYCTDIVVPDEPVVHQYKTLQHLYTPVRAKLKEDHRIFSIISGLHPTPALGGTPRQDALAFIRDNELLDRGWYGAPIGWMDSNNHGEFAVALRSALVQQNEASLFAGCGIVEDSVPESEYEETKIKLMPMLSVLGVD

SEQ ID NO: 94445 - protein, 461 aa, Oceanobacillus sp.
  misc_feature (1)..(461): tr|A0A345PIK5|A0A345PIK5_9BACI Isochorismate synthase M enF OS=Oceanobacillus sp. 160 OX=2052660 GN=menF PE=3 S V=1
MIDIKEVQAEALFAKVIQGLHNNEDAQLVSITKKIQTIDALDFYRRARYMGRNRTFWTNSNRSLFLVGIGEAYEIIADQSRFKETKQQWDNLLKQATIHNPYQLPGTGVIALGGMSFDPKKETTELWKHFKPSQFTIPEFQLTNYQGESYYTINVFVKKNDHPSQLAATIRQIEQTLFQASQVEAESFSIEKKVEIDPEGWKESVRVATSEIRNKKAEKIVLAREVRLSFDKQPESSVIIDKLLDTQANSYIFAFEKNSHCFIGATPERLVKVEQDRLLSTCLAGTAPRGKTKAEDERISYGLLHDQKNRQEHDFVVQMIKLAIKDYCTDLVIPGEPIVYPLKNLQHLYTPVTAKLKAGHSIFDIIEQLHPTPAVGGTPRDESLAFIRENELLDRGWYGAPIGWLDSNQNGEFAVAIRSGLIHGDMASLFAGCGVVKDSNPEAEYEETNIKLMPMLSVLGG

SEQ ID NO: 94446 - protein, 384 aa, Odoribacter sp.
  misc_feature (1)..(384): tr|A0A416W6E5|A0A416W6E5_9BACT Isochorismate synthase O S=Odoribacter sp. AF15-53 OX=2292236 GN=DWW52_09290 PE= 4 SV=1
MENTMTEKTENKLSVAEAQAICLRNNIPFYTYRLPGSHEVIFGAQLSNDTRIFKGFEKHRGEKGFVITPFNHASWSFPFFIKADLSFTDYLTDGESIQNLRNTVFNTPGRIFTKQDCEHFEYLDELRTMIETLKREGMRKAVLSRTITLPCDSLRLAPVIFEQMKQYHHAFLFFAAIPGKCAWMGASPETFLKYDRNGFFTMSLAGTQSVATAKTPPEWSDKDIEEQQIVTDYIHDTLRHYFTRHLDIEGPITLQAGNVFHLCTFFRSDEQLPADQIDELVTQLHPTPAVCGLPKKRAMQIISEIEKQERGYYAGFLGPLQASGAFDLFVNLRTMEVFDDALRLYVGGGITPLSDPETEWQETCQKADTLLNLIRQINYGKVTF

SEQ ID NO: 94447 - protein, 363 aa, Odoribacter splanchnicus
  misc_feature (1)..(363): tr|F9Z4W4|F9Z4W4_ODOSD Isochorismate synthase OS=Odorib acter splanchnicus (strain ATCC 29572 / DSM 20712 / CIP 104287 / JCM 15291 / NCTC 10825 / 1651/6) OX=709991 GN =Odosp_0381 PE=4 SV=1
MTVAEAQTLCLKQGTPFYSYRLPGERESVFGAQLDGEVAPFRQVGEQGKGFILVPFAESEEVPAWFIRGDITFREVTTDIEIRTGLSGTMGLTDIKPGQEPDISWEEYESQVAAMVAALKQGQVRKMVLSRTITLQERAYEKAAVWYTALADRYPEAFVFLVFVPGKTCWLGATPEIFLRQSAAGTETMALAGTRRVGTSGAWGQKEIEEQAIVTEYMAELLETVCGEKWRQEGPFSKQAGQVEHLCTVFRHVGKLTPGLTDRVRRALHPTPAVGGVPAGSALPMIRRIEGRNRRYYAGYVGPVSGDGCWDWFVNLRSMELWPDRIRLHIGGGITALSDPRKEWEETELKSRTLLDIVQYSDK

SEQ ID NO: 94448 - protein, 470 aa, Oerskovia enterophila
  misc_feature (1)..(470): tr|A0A163S913|A0A163S913_9CELL Isochorismate synthase D hbC OS=Oerskovia enterophila OX=43678 GN=dhbC PE=4 SV=1
MTAHAHPRRDADDLGAPPAGSPRPGSTDFPAAPRLVVRTTRLPEGLPGDLTALLDLLPDARPLAWVRRGDGIVGWGEALRLEAWGPGRFADAEAAWQEVLGAAVVHDDVDLPGSGLVAFGSFAFDDASGTAGDARPGGTIVVPRVVVGRRGGPEGTAWVTSITQGDALPDDVASVLDPARRERVAGPGAVATVDGSLSAEDWTEVVAEGVERIRRGDLEKVVLARDVLATAEHPVDPRWMLRRLAVAYDACWTFSVDGMVGATPELLVRSEKGLVTSRVLAGTIRRSGGAEADDDSLLRAAHLARSSKDLEEHEYAVASVADALAPFCSSMNVPDAPFVLHLPNVLHLASDVTGVLAAGTGGSPAPTSLALAAALHPSAAVCGTPTLAARDLIREIEGMDRARYAAPVGWFGADGDGEWGIALRSAELSPQDPHRVRLFAGCGIVAASDPGAELAESEAKLEPMRYALGG

SEQ ID NO: 94449 - protein, 418 aa, Oerskovia turbata
  misc_feature (1)..(418): tr|A0A4Q1L0F2|A0A4Q1L0F2_9CELL Isochorismate synthase O S=Oerskovia turbata OX=1713 GN=EQW78_02765 PE=4 SV=1
MTGFTVLDPAETVVAPDPAHARHHGSPSDAPDAAAPLGHGEFRLASPDVGLVAHGVRERLDVPSWDGPTVAAAARDLLARAASARWAGEPAPILVGTIPFDPSRPAHLVVPAHQSWRPVVAAGAPGETIEEAPLPVARPEGALPGRDDVVFRAAVGRAVSRLEDGVAEKVVLARTLDVSAAGPLDRGVVRAAMRCANPDAYVFDVELPGDQGHLIGASPELLVSVRDGVLHSHPLAGSAPRSADPEEDRATGQRLLTSEKDLREHAFVTAAIREVLRAYVAHEDDLDVPTSPELVATSHLWHLGTPVTARLRPGVSVLDVVYALHPTPAVCGHPQAAARELIGSLEPFDRGFYTGLVGWADQAGNGEWAIVLRCGVVRGADVRLFAGAGVVVGSTPEGEHAETAVKFSTLLSALGVVS

SEQ ID NO: 94450 - protein, 497 aa, Okeania hirsuta
  misc_feature (1)..(497): tr|A0A3N6NW51|A0A3N6NW51_9CYAN Isochorismate synthase O S=Okeania hirsuta OX=1458930 GN=D5R40_01980 PE=4 SV=1
MPAIPTSVNLFQSCQDLHQFLLNCQQTLTEQVQKKVISISVEILPVDPLAVLQEICEPHQLHFYLEKQIIGKTNTEKNTLAIAAADAATHLTVMGGNRFSQARSFIQSCLNNTIVLGATHLPFSGPHFFCSFTFFEQDSQINLHISQNGNYQEKPSINSHFPSATIFLPQWQITQKNNRCILVINTVITTSINIKNISQIIWQKYQQITQINNTSLSSLIKPRGNLRKINPNHLQDFKKSVASALDLINSNSLKKIVLAHAIDIYSQTPVNLIQSLNNLRFIYPDCYVFSTSNGKGQNFIGASPERLISINNNQLITDALAGSAPRGKTSTQDVKLAKSLLCSEKDLREHQFVIDFIIKHLQDLGLNPHYPPQPHLLQLSNIQHLWTPITAEISQNIHLLEILAELHPTPAVAGVPRDTAQQQIHNFETFERSLYAAPIGWIDYQGNGEFVVGIRSALIDGDRTRLFAGAGIVTGSKPEKELAEVQLKLQTLLKALV

SEQ ID NO: 94451 - protein, 461 aa, Omnitrophica sp.
  misc_feature (1)..(461): tr|A0A1G1NDZ6|A0A1G1NDZ6_9BACT Isochorismate synthase M enF OS=Omnitrophica WOR_2 bacterium RIFCSPHIGHO2_02_FUL L_48_11 OX=1801856 GN=menF PE=3 SV=1
MSMSVLREKVKVNQAIGALTDQIQDFDQKALVCKTQAAILRFAVEIESADLIAWLQRQDHFPKFFWADREGQEEVACAGAAHVLTGKGRMNHQFIFDEMQRRLSPDQEHLRYYGGMCFDFQNSDENWKDFGSHYFFIPRFELIKQKKQFIFACNITREEFNQGLLNKVLADLRKIDFSSHVLPARLPKIQKREDYPSDKKWQNIISEELAAITKNDYKKIVLARKSSFRMSAPLEAADILRNLQKVSPHCFYFYLQPKAGAAFVGASPERLYKREGQTIQTEALAGTRPRGSNPQADEKLKKELLNSTKEVHEHQLVVEQIRHVLAELCKDLTIDPKHSLLQLEGGQHLLTRIKGVLLPPVDDARILFVLHPTPAVAGWPTEKILDIIKSREPFARGYYAGPLGYIGWDAAEFAVAIRSGLIQKNTLAVYAGAGIVQGSTAKAEWNEIENKMQIFLKAIEL

SEQ ID NO: 94452 - protein, 472 aa, Opitutaceae bacterium
  misc_feature (1)..(472): tr|A0A556QNJ7|A0A556QNJ7_9BACT Isochorismate synthase O S=Opitutaceae bacterium 53C-WASEF OX=2597822 GN=FPL22_0 2620 PE=4 SV=1
MTILPINPTENASPDALIGFLRQCREAARGDGRERLVSISIQVGALDPLAVLEAIFESGELHFYAERPNIHTAIAGAEAVLVHEASGPERFESAQRFIDDVLARTIAVGDVDAPFGGPHFFSAFTFLDQVEQGEAFPAARVFVPRWQVARAGEVTTAVANLLVAPDSDLATLAERVLRAHGKFKHIDYDAKPAVPVTSQPCVFQTTEAGDFRTTVKGGLAAIAAGVVKKIVLARVQDMQTNAPLHPLRLLNGLRERFPECYSFSVANGRGQSFIGASPERLVRVSKGVLETEALAGSARRGQSASEDAALGAELLASEKDRREQGHVLESIVRRLEPLGFAPQFPSQPVLRKLANVQHLHTPVSAVMPAGIHLLDALARLHPTPAVGGSPREEAVARIRDLEGFPRGLYAGAIGWLNARGGGEFLVGIRSALVEGRNARVYAGAGIVAGSDPEREFAETELKFRAMREALLG

SEQ ID NO: 94453 - protein, 458 aa, Ornithinibacillus halophilus
  misc_feature (1)..(458): tr|A0A1M5K6I5|A0A1M5K6I5_9BACI Isochorismate synthase M enF OS=Ornithinibacillus halophilus OX=930117 GN=menF P E=3 SV=1
MLELKEEQLESILEKGIKQAKNIQLVSVTKKIPTNDPVSIFNAAKIMKKQRSYWRSAEDNFTVVGVGSAFEIKTNKNTYQETDKQWNSILRDAIIHNPFKNEGTGLVAIGGMSFDSKKEKTALWNNFDDSQFVIPEFVYVQNNVEAYLTINVRVNGTEDVTNLSREIQLQEDQLLTETVTAFKTNAIVSKTEVEPQQWKKTVQLATEEMKKSDVAKIVLARELRVKLSKEAHIESIIQDLVNQQPNSYVFAFEYGEDCFIGATPERLVKKEKSQLLSTCLAGTAPRGKDVVEDEKIRKGLLNDKKNREEHDFVVQMIRKAITPFARDIAIPDAPVVLQLKNMHHLYTPVTGIIKENSSLFDIVEKLHPTPALGGTPKEEALSFIREHELLDRGWYGAPIGWLDSNENGEFAVAIRSGLIQKDEASLFAGCGVVADSNPEAEYEETNIKFTPMLSVLGG

SEQ ID NO: 94454 - protein, 460 aa, Ornithinibacillus sp.
  misc_feature (1)..(460): tr|A0A3C1HXL7|A0A3C1HXL7_9BACI Isochorismate synthase M enF OS=Ornithinibacillus sp. OX=1898027 GN=menF PE=3 SV =1
MIEVKEETLESTLVRVIQGLHSSESRLVSFTKKIQPLNPLHFFEAGLTLHMNRSYWHSTIDDFVMVGIGSAVSIHEDSQAISSLEEKWESVLKEAVINNPYQIPGTGIAAIGGMAFDPHKPKTALWNKFTNNELRVPTFLLLVNQQGTFLTTTILVDGMDDPKLLIRQLADQEKALLSYQNIDHKKPVIVGREEVEPEQWKETVKHATEYIAKGQVEKIVLARELRLTFSEEVGLTDVIKQLIDTQPTSYIFAYEKGTDCFVGASPERLIKLEGNQLLSTCLAGTAPRGRNELEDDKIGYQLLHDEKNLQEHDFVVQMIKNSVEEFCQKMEIPKKPVLYRLRNLQHLYTPVRGIFKEGYSIFDVIEKLHPTPALGGEPRKEALSYIRESELLDRGWYGAPFGWIDSNQNGEFAVAIRSGLIQGNTASLFAGCGVVRSSDPEAEFEETRIKFLPMLTVLGG

SEQ ID NO: 94455 - protein, 446 aa, Ornithinimicrobium sp.
  misc_feature (1)..(446): tr|A0A345NR11|A0A345NR11_9MICO Isochorismate synthase O S=Ornithinimicrobium sp. AMA3305 OX=2283195 GN=DV701_16 310 PE=4 SV=1
MPSLDPAAGAELPGRIRVRSEAVDVTGDLLARIPDEVDPRDVVTWLREGDGMVGWGRAALVRTHGPDRFAQAEAWWDRLRTVAEVEDGVRVAGSGLVAFGSFAFAPGSADRSVLTVPRVLIGRRDGMAWVTRVVVDDEPWPSDHPAQMLARTNPRLGELDPLVETEGTVPAARWPEVVGRAVGRIEAGEVDKVVLARDVRVRHREGHAVRVAPVLERLERRYAATWTFAVDGLLGATPEMLVRLQDGRVRSRVLAGTIRRGAHPQHAAPQVSHEHPVDPRLRLVSSEKDLEEHAYAVRSVAEALAPHCTELQVPATPYVLELPDVYHLATDLTGRRADGATSLSLAAALHPSAAVCGTPTEKAAAVITELEGMDRGRYSGPVGWLDGDGDGDWCIALRCGELAPDRGSMRIFAGGGIVAASDPDAELAETEVKLTAMRHALGLLES

SEQ ID NO: 94456 - protein, 317 aa, Ornithobacterium rhinotracheale
  misc_feature (1)..(317): tr|A0A3R5UVC1|A0A3R5UVC1_9FLAO Isochorismate synthase O S=Ornithobacterium rhinotracheale OX=28251 GN=EQP59_085 85 PE=4 SV=1
MSFILYKNPEDERLFYAELKATDTEKNGRNFIFHSFDNQTEWIFEISDQKNISKNEILSLKVDLQSENQPNYILSQSEYLDLCQNFIAELKAKNYEKLILSRVKKTPALSPTETFLKLTQKYPKAFVYLFQHEGTTWLGATPEQLVKVENNTLQTIALAGTKANAENRDWTEKEREEHQFVVDYIASALRDFKPEIGKTFTIELQNISHLKTDISAILPENFNLKQITEQLHPTPAVCGLPKDNSMAFILQNEPHERRFYTGFLGFKSANSADFYVNLRCAELFKEYTLCYVGGGLTAKSDAQSEWQETELKSLTIG

SEQ ID NO: 94457 - protein, 474 aa, Oscillatoria acuminata
  misc_feature (1)..(474): tr|K9THD4|K9THD4_9CYAN Isochorismate synthase family pr otein OS=Oscillatoria acuminata PCC 6304 OX=56110 GN=Os cil6304_1890 PE=4 SV=1
MLVVPSDTNMKPDRKDLYQFLVACQQVSVEKECPQIATLSLELPPLDPLAVLQAIAQPEDPHFYFENGNKGEAIAAIGAAITFHVPSGSARFVKAQTFIQSCLANTITTGATDLPFAGPHFFCNFTFFDDLRPPESAFPCATVLLPRWQVARCRNRSVFVANFSLSPRDNIKALHQDLCNKLTQIRWANSRWLDPVNFPNQSLQNHDFKPTANFKKSVYSALNRINNKTLNKIVLADAIDLNFPLPINLVKSLNNLRRLYPDCYTFATGNGGGTNFIGASPERLLAIYNHQLITDALAGSAPRGKTSAEDVELAKLLLSSDKEIHEHRVVIDFICDRLTRLGLTPNVPPQLLLLQLSNIQHLWTPIQATLPPGIHPLDILADLHPTPAVAGVPRDTACQEIRQYEAFDRGLYAAPLGWIDGYGNCEFIVGIRSALIEGDRARLYAGAGIVAGSDPDKELAEVQLKLKTLLKALV

SEQ ID NO: 94458 - protein, 477 aa, Oscillatoria nigroviridis
  misc_feature (1)..(477): tr|K9VQA3|K9VQA3_9CYAN Isochorismate synthase OS=Oscill atoria nigro-viridis PCC 7112 OX=179408 GN=Osc7112_5502 PE=4 SV=1
MTVIPHRANLLQDRNQLHQFLLDCQQSLTDKDQTKIVSISQEIAPVDPLVVLQEISEPCQRHFYFEKRDPISGNSFAIAALDSTIHLTVAGTDRFTLAQNFIQSCLARTITIGTERLPFSGPHFFCSFAFFDENVATNSYFPPGLVFLPKWQITRLKDSCTIVANAIINRDLNIKIITDNIWKNFDKIASIPYKKITFLRNSSIFLKQIPVNDAAQFKTSVTSALEFIKSQYFSKIVLSQAINVISKTPFSLINSLNNLRLTYPGCYVFSTSNGQGQNFIGASPERLISVHKNELVTDALAGSAPRGKTESEDANLGKGLLNSEKDIREHLAVIDFIVDRLSSLGINPEFSPLPRLLQLSNIQHLWTPIRARIPRDIHLLKILSQLHPTPAVAGVPRDIALKQIRGCESCDRSLYAAPLGWIDRTGNGEFAVGIRSALIDGDRAILYAGAGIVAGSEPEKELAEIQLKLQALLNALV

SEQ ID NO: 94459 - protein, 482 aa, Oscillatoriales cyanobacterium
  misc_feature (1)..(482): tr|K8GJ15|K8GJ15_9CYAN Isochorismate synthase family pr otein OS=Oscillatoriales cyanobacterium JSC-12 OX=86470 2 GN=OsccyDRAFT_1574 PE=4 SV=1
MAVTQYCNQLFQNQRDVYQFLLPYQHGLIDENSSQLISLTFEIPAVDVLAIFNELAATNQLNVYFEKQEASRNYFSQSQRTAIAAIDSVLRFHTESSQRFTQIKHFIHTTLSRIVVAGNLRSLFAGPAFFCHFSFQEKTVYTRDSTFPSATCFLPKWQIVDHNQSCIVVRNLMLEPGTDLPSMVEVLWQSLQQIQAIAYDWITPPTQPLELLSKQDVGTTTAFKQSVRSALQSIQANQFNKIVLAHAVDVCSPVPFHPAHSLNNLRSLYPDCYIFSVNNGRGQSFVGASPERLVCVQNRQLVSDALAGSAPRGQTTHEDVALSHALLNSDKDNYEHQVVVDFITRQLSNLGLVPERSPLRLLQLSNIQHLHTPIRATVPASVHLLDILAALHPTPAVAGMPREITCKEICRYEPFERSLYAAPIGWINHRGDGEFAVGIRSALIDGCRARLFAGAGIVAGSDPERELSEIQLKLQALLAALV

SEQ ID NO: 94460 - protein, 425 aa, Otariodibacter oris
  misc_feature (1)..(425): tr|A0A420XHQ5|A0A420XHQ5_9PAST Isochorismate synthase M enF OS=Otariodibacter oris OX=1032623 GN=menF PE=3 SV=1
MSIFTELKQKLYTALTKISTAQGIIQLTAEMPLLAKDTDLLGWLKGNITYPHFFWKNRSAELTLASIGKVRQFYTLESAQQFSQQTGYDLLGGIKFECECQFILPRIVMTKTKTKLTAYLYIDTANLTEEKRQSKAVLDSLDTIQQLSAPHYQIIEHESVTDFPTWKSNIEKAIQAIRENQFSKVVLANASTLTFNQSLSAYDLLVVSQQKNLGCYHFLWSEKPESAFIGSSPEKLYQRDEQLFYTEALAGTVAVTSDPQQTERNGLWLLSDQKNVHENQLVVDNIYHHIKDSIEEIQISEAEIKRLHNVQHLRRNIQATLKKGVSDADCLMRIHPTAAVAGLPRLLAKQFIADNEGFKRNWYAGTLGYFNPTHAEFCVALRSAQIEKNQIMLYAGAGIVEGSDPESEWQEIERKSLAMASLFVK

SEQ ID NO: 94461 - protein, 451 aa, Paenarthrobacter nitroguajacolicus
  misc_feature (1)..(451): tr|A0A558GZN7|A0A558GZN7_PAENT Isochorismate synthase O S=Paenarthrobacter nitroguajacolicus OX=211146 GN=FQP90 _11825 PE=4 SV=1
MTSTLRTLTVPLDVESSPGGLPSFLVRDDVLCWSRREAGLVGYGELTRFNATGPERFLEADIWWRHLILEAEITDHVELPGTGPVAFGSFAFSKTSPHVSRLILPELVVGIRDGRAWATQLTFDDRPLTEAGVLASVERWLTEPEPNGDGSAAEGSDVGLSPEVVSQDGGSGHLSHGSLSEANWMKAVADGVEEIRAGKLEKLVLARDVVATLPDGVNAAEVLRQLAARYRECWTYGVDGLVGATPEMLIQVEGRTAQARVLAGTLDRRDAEGVDDSPMAYAERVLAGSEKQRHEHEIAIDSLTRQLAPFSEAMNSHSEPFILELPNVWHLASDVKAELADIEGHVPTCLALINALHPTAAVCGTPTLVAGALIRKLEHLDRGPYAGPVGWLDAAGNGEWGIALRGAVIEDANTVRLYAGCGIVEGSQPEAELAETWAKFRPMLEALGIKR

SEQ ID NO: 94462 - protein, 449 aa, Paenarthrobacter ureafaciens
  misc_feature (1)..(449): tr|A0A444GT09|A0A444GT09_9MICC Isochorismate synthase O S=Paenarthrobacter ureafaciens OX=37931 GN=AUR_05410 PE =4 SV=1
MTSTLRTLTVPLDVDSSSGGLPSFLVRDDVLCWSRREAGLVGYGELTRFSATGPDRFLEADMWWRHLILEADITDQVELPGTGPVAFGSFAFSKTSPHVSRLILPELVVGMRDGRAWATQLTFDDAPLTEAGVLAALERWLSDASGDEPAAGGSDVGPSPEVAALNGSRGSLGRGSLSETAWMEAVTNGVEEIRAGKLEKLVLARDVVANLPEGVSAAEVLRQLAARYRECWTYGVDGLVGATPEMLIQVEGRTAQARVLAGTLDRRDAEGVEGSPMEYAERVLAGSEKQRHEHEIAIDSLTRQLAPFSEAMNSHSEPFILELPNVWHLASDVKAELADIEGHVPTCLALINALHPTAAVCGTPTQVAGALIRKLEHLDRGPYAGPVGWLDAAGNGEWGIALRGAVIEDANTVRLYAGCGIVEGSQPEAELAETWAKFRPMLEALGIRR

SEQ ID NO: 94463 - protein, 419 aa, Paenibacillus alvei
  misc_feature (1)..(419): tr|A0A383RCZ1|A0A383RCZ1_PAEAL Isochorismate synthase ( Siderophore-specific) OS=Paenibacillus alvei OX=44250 G N=dhbC PE=4 SV=1
MLKCDTVPTSEGIRLLEQYQAGSSFLFSSPQGALLTHGEWARLVDWQAVDEESLPQAVSKLLDAARQGDRDCPVVVGAIPFHMEDPVCLYVPKEVHRYEPLRMDAHDYLQQETERDSYSVRAVPEPEQYKQGVNQVLERLQSGELQKVVLSRSLEVTLKHDVDVQRLLNRLLSQNTRGYTFAVPLTMEHPHASKDKGISAANGTAQTLIGASPELLVTKRGMHIKVNPLAGSAARSDDPNEDERRAAQLLRSDKDLHEHAVVIEAVVSALRPYCSKLHVPEGPSLVSTKTMWHLSTEINGELADQDISSLELALALHPTPAICGTPTEAARNLIREIEPFERGFFTGAVGWCDANGDGEWAVTIRCAEVEGRSLRLFAGAGIVVGSSAEAELAETSAKLRTLLQAMGLNEQQPMMMQGG

SEQ ID NO: 94464 - protein, 436 aa, Paenibacillus chitinolyticus
  misc_feature (1)..(436): tr|A0A410WZ79|A0A410WZ79_9BACL Isochorismate synthase O S=Paenibacillus chitinolyticus OX=79263 GN=PC41400_1902 5 PE=4 SV=1
MMLGQKEKLLSPADLLDKYSEGSAFYFGSPRRTLLAEGELVRLSVEGKGEELERLPRRVADLLAGVRAGNAAEPVIVGAIPFTVNSGVRPELFVPRHTEWAGPLADAEAVQADVAGDTARSVFDGEVDGGTFKIVSFPTESDYEAAVRKGLEQLRSGKLRKVVLSRSLRLENCPPVQTGRLLRRLAASNTRGYTFAVPLRASGSGHNPGQGQGTAPASAAHTLIGASPELLVARSGQLVTANPLAGSAARSSDPAEDKRRADALLLSAKDRHEHAVVVDAVASALRPYCRKLDVPAEPSVIGTKTMWHLSTKVTGELLEPAASSLELAVAMHPTPAVCGTPTGPARTAIRELESFDRRYFTGMVGWCDAAGDGEWAVTIRCAEIAEDAVTLYAGAGIVEGSDPAAELAETSSKLKTLLLAMGMDPDTGSGGGGKSV

SEQ ID NO: 94465 - protein, 419 aa, Paenibacillus elgii
  misc_feature (1)..(419): tr|A0A2T6G6J4|A0A2T6G6J4_9BACL Isochorismate synthase O S=Paenibacillus elgii OX=189691 GN=C8Z91_09565 PE=4 SV= 1
MVNLETVPAAWASELIDMYEAGSSFFLASPQRTLLAKGEAARLSVQGGADRPKSLPQHVAELLARTQFSGGAPSVVVGAIPFDPAKPAELIVPQTARWAGKLQLSSEAAERQADASDYKLHPVPEPEVYEYSVSRALARFQKGDLRKVVLGRTLHLTLPTRVDVNRLLRNLARHNPHGYTFAVNLAPGEARAAWTPDKSNGQEPRTLIGASPELLVTRTGGRLKANPLAGSAPRSSDPVEDRRRAEALLASAKDRHEHAVVIEAVADALRPYCSRLDVPREPSLVQTSTMWHLSTVVTGELADPWASSLELALALHPTPAICGTPTDLAQETIRESEPFDRGFFTGAVGWCDASGDGEWVVTIRCAEVEGRELRLFAGAGIVEGSSPQAELAETSAKFRTLLQAMGLNQPQLAVVKGDQ

SEQ ID NO: 94466 - protein, 408 aa, Paenibacillus larvae
  misc_feature (1)..(408): tr|V9W8G5|V9W8G5_9BACL Isochorismate synthase DhbC OS=P aenibacillus larvae subsp. larvae DSM 25430 OX=697284 G N=dhbC PE=4 SV=1
MDHTVALEESAIKLLNEYKAGSSFFLASPYQTLLAKGTYATVSHTRLENLSELVTAVLGNAEQAGHRNPVVVGAVPFDQTNPVQLVVPEEIRWAVPLQFDSINELQHSVMSTYEIKAVPEPAEYVRGVEKGVARIKGGDLSKIVLSRSLKLSSSKTIDIPRLLRNLARQNSQGYTFAVDLPEYELDKGDISFISKTQSHRTLIGASPELLVSRSGLQVVSNPLAGSRPRSKDANEDKRRAQELLSSAKDRHEHAVVVEAVAAALRPYCRILDVPAEPSLIHTETMWHLSTEIKGELADPATSVFELAASLHPTPAVCGSPTEAARAAIREIEPFDRGFFTGMIGWCDSNGDGEWVVSIRCAEVLERSLRLFAGAGVVSESRAEDELAETSAKFRTMLLAMGLNNEQLE

SEQ ID NO: 94467 - protein, 414 aa, Paenibacillus lautus
  misc_feature (1)..(414): tr|A0A2A5LCR8|A0A2A5LCR8_PAELA Isochorismate synthase O S=Paenibacillus lautus OX=1401 GN=CPZ30_20590 PE=4 SV=1
MLRYDAPTAAEAAQLMELYQVGSSFFFSSPRKTLLTHGEYSRLPISSGTGHRSLPERVGELLEFAKQAGRRDAVVVGAIPFDIQKPASLFIPLSAQWHDSLLFSEGRDPEMPRISSYKVLSVPEPTAFKEGVNRLLDLISQKKLHKAVLSRTLDITLPHALSIPQILTHLAYHHSHGYTFGVPLAPELSHTSSPDAVASTRTLFGASPELLITKKGSRIKGNPLAGSAARSADPAEDQRRAAALLSSAKDRYEHAIVIDAVASALQPYCSKLEVPAEPALVQTQAMWHLSTEINGVLKDESVTSLELALAMHPTPAICGTPTDAARDAIQEIEPFDRGFYSGAVGWSDANGDGEWAVTIRCAETEGTLLRVFAGAGIVTGSIAEAELAETSAKFRTILAAMGLNEQQTTMLEEG

SEQ ID NO: 94468 - protein, 428 aa, Paenibacillus polymyxa
  misc_feature (1)..(428): tr|A0A074LIE7|A0A074LIE7_PAEPO Isochorismate synthase O S=Paenibacillus polymyxa OX=1406 GN=EL23_02085 PE=4 SV= 1
MKSNTALEVQATHLLKDYKPGSSFFFASPTRTLLAQGTLGALPHGEASDTEGGLTGRVATLLESVRQSHGGHPIVVGAIPFDASRAAQLLVPAETRWAGPLHSHSTNWHSENGKAADSANAASRVNPTKLGQAPDYGIRSVPDPSEFVQGVEQALKYIASGELNKIVLSRTLQLDTSEQVDVPSYLHNLARHNTKGYTFAVDLPALEAEEAGSDGAVVGVEQRTLIGASPELLVSREGLHLTVNPLAGSAPRSDDPVEDKLRAAALLESVKDRHEHAVVVEAVALALRPLCRRLDVPQEPSLIQTETMWHLSTEITGELVDLTVSSLAVALALHPTPAVCGSPTEQAKKVIRDIESFDRGFYTGIVGWCDAAGDGEWVITIRCAEAAKHSLRLFAGAGIVAASNPEDELAETAAKFGTMLQALGLKHE

SEQ ID NO: 94469 - protein, 413 aa, Paenibacillus solani
  misc_feature (1)..(413): tr|A0A0M1P8S2|A0A0M1P8S2_9BACL Isochorismate synthase O S=Paenibacillus solani OX=1705565 GN=AM231_15695 PE=4 S V=1
MLHYDAPTAAEAAQLMEQYQVGSSFFFSSPRKTLLTHGEYSRLPVPVGTGHRSLPERVRELLEYAKQAGRPDAVVVGAIPFDIQKPASLFIPLSAQWHDSLLFSEGAPEMPRISSYKVLSVPEPTVFKEGVNRLLDLISQNKLHKAVLSRTLDITLPHALSIPHILTHLAYHHSHGYTFAVPLAPKLSHASSPDAVASTRTLFGASPELLITKKGSRIKGNPLAGSAARSADPAEDQRRAAALLSSAKDRYEHAIVIDAVASALQPYCRKLEVPAEPSLIQTKAMWHLSTEINGVLKDESVTSMELALAMHPTPAICGTPTDAARDAIQEIEPFDRGFYSGAVGWSDANGDGEWAVTIRCAETEGTLLRVFAGAGIVTGSIAQAELAETSAKFRTILAAMGLNEQQTTMLEEE

SEQ ID NO: 94470 - protein, 410 aa, Paenibacillus sp.
  misc_feature (1)..(410): tr|A0A0D3VAM4|A0A0D3VAM4_9BACL Isochorismate synthase O S=Paenibacillus sp. IHBB 10380 OX=1566358 GN=UB51_13765 PE=4 SV=1
MIKHDVIPVTIATQLLDNYQSGSSFFLSSPQRTLLAQGTFLEMPTYEGTEELSSLPERVTAFLNHVKQSQHNVSVVVGAVPFDHRKPAHLIVPTTIQWGDGLHFEPTNQKEQSLTSKYEISAIPEAAEYVRGVEQGLNHLESSGLRKVVLSRTLQLTSSTMIDTHQLLVNLARNNTRGYTFAVDLPIREAEEWPLGVTPPSSPRRTLIGASPELLVSRSGLQVLANPLAGSTARSEDPEEDQQRAAALLSSAKDLYEHALVVDAVAAALRPYCNTLDVPSVPSLVQTATMWHLSTEIRGELADPSTSALTLAVALHPTPAVCGSPTEMAREVIREIEPFDRGFYAGMVGWCDSNGDGEWVVTIRCAEVDDHSLRLFAGAGVVLGSSPEGELSETTAKFRTMLIGMGLNDE

SEQ ID NO: 94471 - protein, 417 aa, Paenibacillus thiaminolyticus
  misc_feature (1)..(417): tr|A0A378X9H1|A0A378X9H1_PANTH Isochorismate synthase O S=Paenibacillus thiaminolyticus OX=49283 GN=dhbC PE=4 S V=1
MLKYDDAALAASAAELLEQYRTGTSFFFSSPERTVLARGEWARVPVQEGLDGCHRLPERVAALLAVARQAGHAIPLVAGAIPFAPAKPAQLIVPNDVQWAGPLRFDTGLLREQPVASAWEIQPIPEPDRFMDGVNEALARLGEGALQKVVLSRTLRMTAPEIVDVHQLLRNLAGHNTHGYTFAVDLAAGDDSAAEAHTGRTGPRTLIGASPELLVTKTGGRVTANPLAGSAARSDDPDEDKRRAAALLASGKDRHEHEVVIDAVVAALRPYCRALHVPAGPSLVQTKTMWHLSTNITGELADPAVSSLELAMALHPTPAICGTPTDLARAVIKDIEPFERDYYTGAVGWCDVNGDGEWAVTIRCAEAEGRTLRLFAGAGIVAGSNAASELEETSAKFRTLLLAMGVDQEQCSTVKER

SEQ ID NO: 94472 - protein, 419 aa, Paenibacillus tyrfis
  misc_feature (1)..(419): tr|A0A081P7R0|A0A081P7R0_9BACL Isochorismate synthase O S=Paenibacillus tyrfis OX=1501230 GN=ET33_33425 PE=4 SV =1
MVNLETVPAAWASELIDMYEAGSSFFLASPQRTLLAKGEAARLSVQGGADRLKSLPQHVAELLARTQFSGGAPSVVVGAIPFDLAKPAELIVPQTVRWAGKLQLNSEAAERQSDAADYKLRPVPEPEVYEHSVSRALTRFQKGDLRKVVLGRTLHLTLPTKVDVNRLLRSLARHNPHGYTFAVNLAPGEARAAWTPDEPNGREPRTLIGASPELLVTRTGGRLKANPLAGSAPRSSDPVEDRRRAEALLASAKDRHEHAVVIEAVADALRPYCSRLDVPREPSLVQTSTMWHLSTVVTGELADPWASSLELALALHPTPAICGTPTDLARETIRESEPFDRGFFTGAVGWCDASGDGEWIVTIRCAEVEGRELRLFAGAGIVEGSSPQAELAETSAKFRTLLQAMGLNQPQPTAVRGDK

SEQ ID NO: 94473 - protein, 446 aa, Paenibacillus xylanexedens
  misc_feature (1)..(446): tr|A0A3N6BWB6|A0A3N6BWB6_9BACL Isochorismate synthase O S=Paenibacillus xylanexedens OX=528191 GN=EDO6_04818 PE =4 SV=1
MSKAGMVTATSAIHLLEQYREGTSFFWSSPQHTLLAQGERVRWSPLHTEHTIQSDPSDSADVMEHKYKEEIHLFIDGIQQLMDKAKQAGQSNPMVVGAIPFDPLDAAAELYVPETVKWAEPLPSESRALIQKLPAAVGCEVVEVPAGGVYEQSVDNVLVDLNQRDLHKVVLSRTLEVTSQTLVDTYQLLRNLFRDNTHGYTFAVPMRGQTQSRSTITMNKQHKAGGKIGNKTSRTFIGASPELLVTRKGINVRANPLAGSAPRSEDPAEDRRRAEELLASAKDRHEHAVVIEAVAEALRPLCRKLSVPAEPSLIQTRTMWHLSTEIHGELADAATTSLELALALHPTPAICGTPVQAARAAIKQQEPFDRGLFTGMVGWCNSEGDGEWAVTIRCAEVEGTAVKLFAGAGIVAGSTAEAELAETAAKFRTMLVAMGLDSTVSIQKGD

SEQ ID NO: 94474 - protein, 445 aa, Paeniglutamicibacter gangotriensis
  misc_feature (1)..(445): tr|A0A5B0E634|A0A5B0E634_9MICC Isochorismate synthase O S=Paeniglutamicibacter gangotriensis OX=254787 GN=FQ154 _15945 PE=4 SV=1
MTSQLSAAPGTQSPGTVPLLRSITIQRPAMSEHGLLDYITRDESLVWSRHGEGTVGFGQVARFESTGAERFALARHWWDAISETADVQDPLQQPGTGLIAFGAFAFSFSSSYASRLIVPKIVVGRNETCSWITYTVADPEAELSAEAAETELAGLLEDYSPEHELGAGADKLVAGQISEQAYRDSVLKGVSVIESGAVTKLVLARDAVAELASPIAVAQVLRQLALRYNDCWTYSVDGLIGATPEMLVRVRGDFAEARVLAGTLDRATAPSDDPDYAHRMLLEDEKQRHEHQLAIDSLTEQLGPLASGMDAPDEPFVLQLPNVWHLASDVKATLATRADGSVPGVLDLAEVFHPTAAVCGTPTKEAGRILRELEGMDRGPYAGPVGWIDTRGNGEFGIALRGGVVESPTSVRLYAGCGVVAASDPAAELAESWAKMRPMREALGI

SEQ ID NO: 94475 - protein, 460 aa, Paenisporosarcina antarctica
  misc_feature (1)..(460): tr|A0A4V1AMV4|A0A4V1AMV4_9BACL Isochorismate synthase O S=Paenisporosarcina antarctica OX=417367 GN=E2636_05425 PE=4 SV=1
MIQKSITSIGYAIEDLSSGVHFYTETIEVSRLSSIAFFEAGESYKGQRFYWQNREKTFTLVGLGHAHVITSSSEDKRFEEVDKQWSELCSKIVNEEHDLQPILFGGFSFDPANQLSSEWDMFPSAYFAVPSFQLVIRDDRVFISIHLVTKEKDSQHRFDQLRSERDDLIHAAQVRELKPYAKPLLTNLEERFKELYLDAVSHVTKLIRTGEAQKVVIARSLTLTFAEDVSSPSAMYHVSKEQPESFLFGLELADNLFFGATPERLVKVENRRALSTCLAGSIKRGQTATEDQQLGNELLQDLKNLEEHQYVVDMITKVFTKYCEAVKVPKYPKLMKIRDIQHLYTPVEGQLQKGQGLLQLVKDLHPTPALGGEPRGDAMAIIRMVEQMNRGYYAAPVGWIDAAGNGEFAVAIRSALLNKQNAYLYAGGGIVADSDPTSEYAETLVKFRPMLRTLGGKLNG

SEQ ID NO: 94476 - protein, 459 aa, Paenisporosarcina sp.
  misc_feature (1)..(459): tr|A0A385YSV4|A0A385YSV4_9BACL Isochorismate synthase O S=Paenisporosarcina sp. K2R23-3 OX=2320858 GN=D3873_084 60 PE=4 SV=1
MKEPLQELHAVPINHASEYFYIETIEVPHLSAIAFFEAGKEFKGERYYWQNRDNTKTIVGLGHLKTFTSNHSSDRFDDIQMQWNLLLQHVVQEKEDASPVLFGGFSFDPINSLPSEWSAFPTAFFAVAKFQLVIEKERSYLSIHYLGNEKDSAEVFESLRKQRDELIHSAQVKEWKVYVKHDVVKAEEILRDSYLEAVTNTRNAIRRGQLNKAVIARKLVLTMKEEVHVPSSLYFLSKEQPESYEFGLENGDSAFVGATPERLVKVEDETVFTTCLAGSIKRGTNALEDKHLGEELLADQKNLEEHQYVVKMISDVFDELCTDVKVPFGPKLMKTRDIQHLYTPIEGKPDNTSSIFQFVEKLHPTPALGGAPTEEAVKLIRVEEKMNRGYYAAPVGWVDARGNGEFVVAIRSALLQGKNAYLYAGGGIVANSTAEKEYAETIVKFRPMLRALGGNLDGI

SEQ ID NO: 94477 - protein, 357 aa, Palleronia marisminoris
  misc_feature (1)..(357): tr|A0A1Y5TKJ1|A0A1Y5TKJ1_9RHOB Isochorismate synthase D hbC OS=Palleronia marisminoris OX=315423 GN=dhbC PE=4 S V=1
MQPFRLGERAGVVRGRIVGRIEALAEAVSDSAAATFVGAIPFDRREDGFLLTPEPTGPWTPGSGDPVRRPSVRLRQVPAPEDYAAQVDALTRRIAAAGDGLRKAVIARTLEIEAPDIIDPFFVHARLNGDATMRYCLPLPPLDGAPQRWLLGATPELLLSKRQGKIASHPLAGSARRSADAVEDRAAAERLLASGKDRHEHALVVEYVLDVLAPHCSHLHAPEGPSLEATQSMWHLGTRIEGVLKDPSTPCLDLVGLLHPTPAVAGVPLAAALVAIAETETIRRGFYAGAVGWANAAGDGAWHVTLRCSEIEGRHARLFAGAGIVADSVPQGEVEETEAKFQAMLSAFDCGPLPSPN

SEQ ID NO: 94478 - protein, 468 aa, Paludifilum halophilum
  misc_feature (1)..(468): tr|A0A235B447|A0A235B447_9BACL Isochorismate synthase M enF OS=Paludifilum halophilum OX=1642702 GN=menF PE=3 S V=1
MSMVKQLDIRELLAQGAVRAREEDCEVLVSQVIPVKPMDPLAFFAYGAEPYAGERSFWADPNRDRILAGLGTAYRVEAEAEDRFAGVEARWRDLLRKSIREPHTHRNGTGPLLMGGFSFDPLKPKSGRWEEYADASMVLPRFLLTVAGEDCWLTVNAVIRPAEDPVSLADRLEREKQDLLSGVPATFTPMESPSFETVEVDPEAWKRSVAETAREIREGVMEKVVLARQLRVEASGRLAPASILKRLQEQQTDCFLFAVERGASCFLGASPERLVRRNGKRFLSTCLAGSIRRGSSPEEDERLGQELLSDGKNRVEHEVVVHMIREAFRTGCDAVEVPEEPVLYKAGYIQHLYTPVTGRARPGTTLLSMVKRLHPTPALGGYPQEKSVEKIREKERMDRGWYAGPVGWVDWRGDGEFAVAIRSALVKGDQAFLFAGCGIVGDSDPDSEYEEARIKFRPILSAMGGRDR

SEQ ID NO: 94479 - protein, 392 aa, Pantoea anthophila
  misc_feature (1)..(392): tr|A0A506P9L1|A0A506P9L1_9GAMM Isochorismate synthase O S=Pantoea anthophila OX=470931 GN=FJW00_05430 PE=4 SV=1
MAESRAFEHPLLHDFAALCQGFLFTSPWQSLTTQGCFTTLTTPVRQGEQLTGDFQQQLQHHFTSARKQGIAHPIVAGAIPFDVAQPAALFIPESWQRFNRDDLIARASLADADLPMIRRRTALPDQARFTEMVAQAVAATRRGDLEKVVLSRLMEIVAEQPVDTAALMQRIVVQNPGSYHFHLPLPGGGALVGASPELLIRKQGRLFSSCPLAGSAARSRDPQRDRASGDSLMQSAKDRHEHQLVTDAMRATLQPRSRLLSVPETPSLLTTATLWHLATQIRGEVLDERENALSLACLLHPTPALSGFPHQRAQALIQRLEPFERQLFGGIVGWCDDHGNGEWVVTIRCGTVKGSRVRLFAGAGIVTDSQPEAEWRETGVKLDTLLRAFGLQ

SEQ ID NO: 94480 - protein, 393 aa, Pantoea dispersa
  misc_feature (1)..(393): tr|A0A518X9A2|A0A518X9A2_9GAMM Isochorismate synthase O S=Pantoea dispersa OX=59814 GN=D8B20_02085 PE=4 SV=1
MVETPTFENACLQDFSALCRGFLFTSPWRSLATQGCYTTIDTPVQDAAQPQGAFQQQLRRHFADASKQGIAHPIVAGAIPFDVSQPAALFIPESHHLFHRTDLQRTLASPAEPLPQVRRRAAVPDHAGFTRMVADAVSAIRQGDPQKVVLSRLLDIVTEQPVDSAALMQRVIAQNPDSYHFHLPLPEGGALVGASPELLVRKQGRDFHTCPLAGSARRHPQDVQQDRAAGEALMQSAKDRHEHQLVTDAMRATLQPRSRLLSVPAVPSLLTTATLWHLATQIQGDVLDARENALSLACLLHPTPALSGFPHARACQLIQQLEPFDRRLFGGIVGWCDSEGNGEWVVTIRCGTVQGNRVRLFAGAGIVADSHPESEWRETGVKLDTMLRAFGLQ

SEQ ID NO: 94481 - protein, 431 aa, Pantoea sesami
  misc_feature (1)..(431): tr|A0A1M5W4V8|A0A1M5W4V8_9GAMM Isochorismate synthase M enF OS=Pantoea sesami OX=1881110 GN=menF PE=3 SV=1
MNSIFLALEQLRTQLSQALPAAPGIRHFDVSFPLNDAFDPLAWLGEQQCYPQFYWQQRNGDEELAALGAVNQFSSLALASQFLREQNAAQDTRVCGLNAFNPEQGSLFLPRLLWRRTAGNATLRLQLWSDRSLVEDARVAQDFLQRLRPARSIRPLSVHVEHETHQPQQAEWLKLIRRATETIARGDFEKVVLARATDLQFTQRVNPVALMAASRALNLHCYHFCMVFDARNAFLGSTPERLWRRRGKLLRTEALAGTVASHTDDSQAQRLGEWLLNDDKNQRENMLVVEDICQRLQHSTQTLEVLPPQVVRLRKVQHLRRCIWTELKQADDEQCLLMLQPTAAVAGLPRQPAREFIQKVEPFNREWYAGSAGYLSPEQSEFCVALRSARVQEDSLRLYAGAGIVSGSDPEQEWLEIENKAAGLRSLLLRD

SEQ ID NO: 94482 - protein, 393 aa, Pantoea sp.
  misc_feature (1)..(393): tr|A0A4S3L9H2|A0A4S3L9H2_9GAMM Isochorismate synthase O S=Pantoea sp. R102 OX=2507583 GN=ERD80_18430 PE=4 SV=1
MVESSTFENAWLKDFSALCRGFLFTSPWRSLATQGCYTTINTPVGDAALLQGDFQQQLRQHFAAAKKQGIANPLLVGAIPFDVSQPASLFIPESWQSFNRADLQQALPAQQSDLPAVRRRTAVPDHAVFTRMVADAVTTIQRGDPDKVVLSRLMDIVTEQPVDTAALMQRVIAQNPNSYHFHLPLAEGGALVGASPELMLRKQGRDFSSCPLAGSARRHHDDASADRVAGNTLMASAKDRHEHQLVTDAMRSTLQPRSRLLSVPTVPSLITTATLWHLATQIDGEVQDERENALSLAALLHPTPALSGFPHARAQQLIQQLEPFDRQLFGGIVGWCDSEGNGEWVVTIRCGTVNGTRVRLFAGAGIVADSQPESEWRETGVKLDTMLRAFGLQ

SEQ ID NO: 94483 - protein, 392 aa, Pantoea vagans
  misc_feature (1)..(392): tr|E1SC65|E1SC65_PANVC Isochorismate synthase EntC OS=P antoea vagans (strain C9-1) OX=712898 GN=entC PE=4 SV=1
MVESLAFEHPLLQDFPALCRGFLFTSPWRSLTTQGCFTTLTAPVNQGEQLTGEFQQQLQHHFASARKQGIAHPILVGAIPFDVDQPAALFIPESYQTFQRDDLKAHASLAESNLPKVRRRTALPDHATFTDMVAQAVTATQRGDPDKVVLSRLMEIVAEQPVDTAALMQRILAQNPDSYHFHLPLPDGGALVGASPELMIRKQGRQFSSCPLAGSAPRNSDPQRDQASGDSLMRSAKDRHEHKLVTDAMRMTLQPRSRLLSVPEIPSLLTTPTLWHLATQIRGEVLDDRENALSLACLLHPTPALSGFPHQRAQALIQQLEPFERQLFGGIVGWCDDQGNGEWVVTIRCGTVNGPRVRLFAGAGIVADSQPESEWRETGVKLDTMLRAFGLH

SEQ ID NO: 94484 - protein, 366 aa, Parabacteroides acidifaciens
  misc_feature (1)..(366): tr|A0A3D8HJI5|A0A3D8HJI5_9BACT Isochorismate synthase O S=Parabacteroides acidifaciens OX=2290935 GN=DWU89_0050 5 PE=4 SV=1
MTPDEISTCHIIDALINENRSFALWRIPGESPRFAMQTSGSARLLYNIEELDGQSGFVIAPFHVSEQHPIVLIRPDTTVVPSAWHNRANTMTQPCHRHGTTVPTVGNDKEDYAYRFNLFIEPLRKKAFDKLVLSRHQVVDGQPLSFSPAATFYEAIKRYRYSYVYLCHTPATGTWLGCTPEIILSGEKGEWHTVALAGTQPLQDGELPTEWDDKNREEQEYVAFYIRKQLHALGIKPEESAPSPVRAGELAHLKSDFSFPLPDNRKLGDLLKRLHPTPAVCGLPKEEAYRFIRENEGYDRSYYSGFIGLLAPEGRSDLYVNLRCMNILANTLVLYAGGGILASSEPESEWLETEAKMQTMKRLLEI

SEQ ID NO: 94485 - protein, 365 aa, Parabacteroides distasonis
  misc_feature (1)..(365): tr|A0A173RKI9|A0A173RKI9_9BACT Isochorismate synthase e ntC OS=Parabacteroides distasonis OX=823 GN=entC PE=4 S V=1
MIPRDFYEIIDTLIKQGRSFAIWRIPGEDRLHFRMQSAGSPCLLYDIKDLNERSGFVIAPFQVTAERPIVLIQPDCFEIPSESDRDFSREKNEFPSNEIEIPSESEEKERYAYHFSLFTNPLLKGSQDKLVLSRSKTIRKDPSFSPGKAFFAAVERYIRSYVYLCHTPETGTWMGGTPEILLSGEKGDWQTVALAGTQSLRDGKLPKSWDHKNWREQQLVASYIRRQLSTLGITPEEKGPYSARAGEVSHLKSDFFFSLPDSEKLGDVLQLLHPTPAVCGLPKEEAYHFIIEHEGYDRSYYSGFIGWLDPKGKTDLYVNLRCMNILPKTFTLYAGGGLLAASQLEDEWQETEDKLDTMRRIVGNL

SEQ ID NO: 94486 - protein, 376 aa, Parabacteroides johnsonii
  misc_feature (1)..(376): tr|B7B9M5|B7B9M5_9BACT Isochorismate synthase OS=Paraba cteroides johnsonii DSM 18315 OX=537006 GN=PRABACTJOHN_ 01728 PE=4 SV=1
MTPDELRICNVVDTLIKKNRSFALWRIPGESPRFAMQTSGSARLLYHIEELDEQSGFVIAPFHVSKQHPIVLIRPDIQELPSDEEIKVSCLWNKSSMPTEQEFHHSETLVSYPENPKEDYNRRFNTFIEPLHRKQFEKLVLSRSQTIPAGKTDFSPAAAFHKAIERYKYSYVYLYHTPETGTWLGCTPEIILSGEKGEWHTVALAGTQPLQNGELPTEWDDKNREEQEYVAFYIRKQLQALGIKPTETPPAPVRAGELSHLKSDFSFPLPDNKKLGELLKRLHPTPAVCGLPKEETYRFIRENEGYDRSYYSGFIGWLAPEEKSDLYVNLRCMNILPGSFVLYAGGGILASSETESEWLETEAKMQTMKRLVSIDN

SEQ ID NO: 94487 - protein, 372 aa, Parabacteroides merdae
  misc_feature (1)..(372): tr|A0A414L6K8|A0A414L6K8_9BACT Isochorismate synthase O S=Parabacteroides merdae OX=46503 GN=DW705_16645 PE=4 S V=1
MTPDELRICNVVDTLIRKNRSFALWRIPGESPRFAMQTSGSARILYHIEELDEQSGFVIAPFHVSKQHPIVLVRPDIQKLPPDEETKVSYLMPAEQEFHHSETLVSFLENPKEDYSRRFNAFIEPLRRKQFEKLVLSRCQTIPADRANFSPAAAFHKAIRRYKYSYVYLCHTPKTGTWLGCTPEIILSGEKGKWHTVALAGTQPLQNGELPIEWDDKNREEQEYVAFYIRKQLQALGIKPTETPPIPVRAGELSHLRSDFSFPLPDNKKLGELLKRLHPTPAVCGLPKEETYRFIRENEGYDRSYYSGFIGWLAPEGKSDLYVNLRCMNILPGSFVLYAGGGILASSETESEWLETEAKMQTMKRLINSTDN

SEQ ID NO: 94488 - protein, 365 aa, Parabacteroides sp.
  misc_feature (1)..(365): tr|A0A3E4PC14|A0A3E4PC14_9BACT Isochorismate synthase O S=Parabacteroides sp. 20_3 OX=469591 GN=DXC95_07435 PE= 4 SV=1
MIPRDSYEIIDTLIKQGRSFAIWRIPGEDRLHFRMQSAGSPCLLYDIKDLNERSGFVIAPFQVTAERPIVLIQPDCFEIPSESDWDFSREKNEFPSNEIEIPSESEEKERYAYHFSLFTNPLLKGSQDKLVLSRSKTIWKDPSFSPGKAFFAAEERYIRSYVYLCHTPETGTWMGGTPEILLSGEKGDWQTVALAGTQSLRDGKLPKSWDHKNWREQQLVASYIRRQLSTLGITPEEKGPYSARAGEVSHLKSDFFFSLPNPEKLGDVLQLLHPTPAVCGLPKEEAYHFIIENEGYDRSYYSGFIGWLDPKGKTDLYVNLRCMNILPQTFTLYAGGGLLAASQLEDEWQETEDKLDTMRRIVGNL

SEQ ID NO: 94489 - protein, 347 aa, Parachlamydia acanthamoebae
  misc_feature (1)..(347): tr|F8L162|F8L162_PARAV Salicylate biosynthesis isochori smate synthase OS=Parachlamydia acanthamoebae (strain U V7) OX=765952 GN=pchA PE=4 SV=1
MGFDQCDAFLKNGTIMSNENGNFLLGYGARTWLSSPCSSSPCFYFPDFFLELASPWFKHAYWEERSYEELKEFLEPIESTISEWQNRDQTYFMNGFEDLKNKFQQGKMEKAVPYAFEFSNSTMTREKLQRSLNRLLHYSHAQPVNVYGFWDQHSGILGATPEVLFKMQRQEKNMLYTHACAGTRGRSDIDNLFDCKELHEHDVVVQGIVESLSSLGKIHIGELKALHLPFLSHLITPIEVELDVSEDFEKIVRRLHPTPALGGFPKNESLEWIKNYKTTVERGRFGAPAGYIYANVANCFVSIRNVQWNAEQMMIGAGCGVVAESQMRNEWNEINLKMQSIKEMLGI

SEQ ID NO: 94490 - protein, 401 aa, Paracoccus pantotrophus
  misc_feature (1)..(401): tr|A0A1I5HJQ7|A0A1I5HJQ7_PARPN Isochorismate synthase O S=Paracoccus pantotrophus OX=82367 GN=BDE18_0548 PE=4 S V=1
MNIRLSEAPRKTASPVPDPVLFGFDGPSGRIQGRGPARRIAAGNAATLEARVAAALAGVAPDAVIGGALPFDREAGDCLWHCRRSEASAPGGAALQGLPLPGWRLTAEPAARDYAGAVARALGIMAEEAGSRDALEKIVLARTLLVESAAPIPVEALMARLHADRSVTAFRVALPAGPEHPQGRALCGATPELLVEKRGRTIASHPLAGSARRLADPVADHAAAAALSGSAKDHREHALVVEAILDTLAPWCRELGCPQGTCVTSTRSMWHLGTRIEGRLKDADTPSVVLASALHPTPAVCGVPMGRAAGFIKALEPVARDFYAGAVGWCDASGDGAWYVAIRCAEISGRQARLYAGAGIVPGSDPMAEAAETGAKFGALLAALGLPQDAALQGVACNGDT

SEQ ID NO: 94491 - protein, 401 aa, Paracoccus siganidrum
  misc_feature (1)..(401): tr|A0A418ZUJ6|A0A418ZUJ6_9RHOB Isochorismate synthase O S=Paracoccus siganidrum OX=1276757 GN=D3P05_21200 PE=4 SV=1
MNIRPDDNGQHGAQPDAADCLFSFDGPGGAIAGHGPARAIERGPAATLEDRLARAMGNEAARQGAVIGGALPFDKQDHDCLWQAVSLSFAPARAGGAGPEAEPALPAIRALRPEPPATDFADAVARALRIMGEEAGGPDALAKIVLSRSLAIEAESPLPLPAILSRLARDRSVTTFRTRLPGGPDHALVGATPELLLRKSGDRIASHPLAGSARRSPDPAQDRAAAEALSRSDKDRREHRLVVEYILDLLAPFCRDLTCPEGTRLTHTRGMWHLGTRIEGQLNDDTIPAVLLAAGLHPTPAVCGLPVARAAALIRALEPVPRGFYAGAAGWCDARGDGAWFVAIRCAEIRGAFARLHAGAGIVPGSAPMAEAAETGAKFGALLAALGLPRDAGMAGVDMPG

SEQ ID NO: 94492 - protein, 402 aa, Paracoccus sp.
  misc_feature (1)..(402): tr|A0A3N7GJC1|A0A3N7GJC1_9RHOB Isochorismate synthase O S=Paracoccus sp. BP8 OX=2305219 GN=D1H97_07905 PE=4 SV= 1
MNIRLSEAPEKAASPVPDPVLFGFDGPSGRILGRGAARRVAPGNAATLEARVAAALAAAAPGEMIGGALPFDREAADCLWQCRRGEAPAPTGIAPPGLPLPDWHLAAEPAAGDYAGAVARALGIMAEEAGSRHALEKIVLARTLLVESAVPIPVEALMARLRADRSVTAFRVALPAGPDHPQGRTLCGATPELLVEKRGRSIASHPLAGSARRLADPVADRAAAEALAGSGKDHREHALVVESILDTLAPWCRELGCPEGTRVTSTRSMWHLGTRIEGRLKDEGTPSVVLASALHPTPAVCGVPMARAAGFIKALEPVARDFYAGAVGWCEAGGDGAWYVAIRCAEISGRRARLYAGAGIVPGSDPMAEAAETGAKFGAFLAALGLPQDAGLAGVARKDGEN

SEQ ID NO: 94493 - protein, 401 aa, Paracoccus versutus
  misc_feature (1)..(401): tr|A0A369U2W2|A0A369U2W2_PARVE Isochorismate synthase O S=Paracoccus versutus OX=34007 GN=DVR11_08650 PE=4 SV=1
MNIRLSEAPSKTASPVPDPVLFGFDGPSGRILGRGPARRIAAGSAATLETRVAAALAGAAPDEMIGGALPFDREAGDCLWQCRRSDAPAPGGAAPQGLPLPDWRLTAEPAARDYAGAVARALGIMAEEAGGRDALEKIVLARTLLVESTAPIPVEALMARLHADRSVTAFRVALPAGPEHPQGRALCGATPELLVEKRGRRIASHPLAGSARRLADAAADRAAAQVLSGSAKDHREHALVVESILDILAPYCRELGCPEGTCITSTRSMWHLGTRIEGRLKDEDTPSVVLASALHPTPAVCGVPMARAAGFIKALEPVARDFYAGAVGWCDASGDGAWHVAIRCAEISGRRARLYAGAGIVPGSDPMAEAAETGAKFGALLAALGLPQDAALQGVPCNGET

SEQ ID NO: 94494 - protein, 404 aa, Paracoccus yeei
  misc_feature (1)..(404): tr|A0A386UHR0|A0A386UHR0_9RHOB Isochorismate synthase O S=Paracoccus yeei OX=147645 GN=PY32053_00493 PE=4 SV=1
MNIRMSEAPEILAPLDDDPVLFAFQGPHGRVQGRGAPVQVPRGGADTVAARVGQALSGALPGAMIGGALPFDRTQADCLWLCNRAAPQPAAAARPAAAVPGAEQRPDWRLTAEPEPAAYARAVARALAIMQDEAGRVGALEKIVLARSLRAESGAPIAVEALMERLAQDASVTAFRVALPPRGRQTRQLCGATPELLLSKTGALIASHPLAGSARRLADPEADRAAAQVLARSDKDQREHALVVESILDVLSPWCRSLSAPEGTQLTTTRSMWHLGTRIEGMLKDPEMPSVVLAALLHPTPAVCGVPMARANALIHDLEPVPRDFYAGAVGWCDARGDGAWYVAIRCAEIAGATARLYAGAGIVPGSDPMAEAAETGAKFGAFLAALGLPPDAGLAGLAPNEVE

SEQ ID NO: 94495 - protein, 459 aa, Parageobacillus caldoxylosilyticus
  misc_feature (1)..(459): tr|A0A150M589|A0A150M589_9BACI Isochorismate synthase M enF OS=Parageobacillus caldoxylosilyticus OX=81408 GN=m enF PE=3 SV=1
MAILYQHKIRERLHLIEKRTKRPFISWTEELNDVDPVYFFSLGPICSFRERFFWGDRTNETVYVGLGCTYVIETEEKEERFHTVETQWKQWVEQTDHYSNGIKMGPILFGGFSFDPYKPHTEKWRAFPHAKMLVPAVLLASKGGKATLTVTVRSGQSEETMEKIETLFRLLHEGRAPIHSLPSVRKYEEKQTEQWFDAVKQTIANIHSGKFDKVVLAREARLSFADRVEASVVLRQLREQQPFSYLFAFEQEGQCFIGASPEQLVKKEGDACYSTCLAGSIRRGKTVQEDEQLGEWLLHDEKNLHEHHFVVQMIKEAMEAVCERVYMPPSPQLLKLPNIQHLYTPVIGEHCRASSILSMVAKMHPTPALGGTPREAAVKEIREVEPLDRGWYAGPIGWMDTEGNGEFAVAIRSGLLQGQEVSIFAGCGIVGDSDPISEYEETKVKFIPMLSALGVGQDE

SEQ ID NO: 94496 - protein, 459 aa, Parageobacillus genomosp.
  misc_feature (1)..(459): tr|A0A023CM86|A0A023CM86_9BACI Isochorismate synthase M enF OS=Parageobacillus genomosp. 1 OX=1295642 GN=menF P E=3 SV=1
MAILHQHKIREQLHLIEKKAKRLFISWTEELNDVDPVYFFSLGPKCSFRERFFWMDRTSETIYVGLGCTYVIETAEKEERFHTVETKWKQWIEQSAFYSNGTKTVPILFGGFSFDPYKPRTEKWRAFPHAKMVVPAVLLASKGGKATLTVTVRSGQSAETVEKIETLLHLLHEGQASIHSLPSLIKYEEIQTEQWLDTVKQMIAKIHSGKFDKVVLAREARLSFANRVEASAVLQQLREQQPFSYLFAFEQEGQCFIGASPEQLVKKEGDVCYSTCLAGSIRRGKTVQEDEQLGEWLLNDEKNLHEHHFVVQMIKEAMEAVCERVHMPPSPQLLKLPNIQHLYTPVVGEHCRASSILSMIAKMHPTPALGGTPREAAVKEIREVEPLDRGWYAGPIGWMDAEGNGEFAVAIRSGLLQGQDVSIFAGCGIVGDSDPISEYEETKVKFTPMLSALGVGQDE

SEQ ID NO: 94497 - protein, 460 aa, Parageobacillus thermantarcticus
  misc_feature (1)..(460): tr|A0A1I0SK44|A0A1I0SK44_9BACI Isochorismate synthase M enF OS=Parageobacillus thermantarcticus OX=186116 GN=me nF PE=3 SV=1
MAILYQHKIEEQLRFIGKKTNRPFISWSGEMDRVDPVYFFALGQACSFRERFYWSDRANETVYVGLGCTYSIETEEKEQRFHSVETQWKRWMEEIASYHNGTDATPILFGGFSFDPHKPKTDKWRAFPHAKMVVPTVLLSLKNKKATLTVTVPSECHEEVIEKIGMLMRLLSQEQRQPTSSLPKLVKYEEIQKEEWIHAVEKTIGNIRKGKLDKVVLAREARLSFADTIDPSAVLWRLREQQPFSYLFAFEQEGQCFIGASPEQLVKKEGDACYSVCLAGSIRRGKTFQEDEQLGQWLMHDEKNLREHQFVVQMIKEAIEAVCEHVDMPASPQLLKLQHIQHLYTPVIGEKCHAASVLSIVEQMHPTPALGGTPREKAMKEIREIEPLDRGWYAAPIGWMDAEGNGEFAVAIRSGLLSGKEAFIFAGCGVVGDSDPISEYEETKVKFTPMLSALGVERNE

SEQ ID NO: 94498 - protein, 460 aa, Parageobacillus thermoglucosidasius
  misc_feature (1)..(460): tr|A0A178U3A8|A0A178U3A8_PARTM Isochorismate synthase M enF OS=Parageobacillus thermoglucosidasius OX=1426 GN=m enF PE=3 SV=1
MAILYQHEIEEQLRFIGKKANCPFISWSGEMDDVDPVYFFALGQACSFRERFYWSDRANGTVYVGLGCTYSIETEEKEQRFRIVETKWKKWMEQLAFDHHGTAATPILFGGFSFDPFKPRTEKWRAFPHAKMVVPTVLLSLKNGKATLTVTVPSMRYEESMEKIGLLLRLLSQEQKQPTASLPTLVKYEEAQKDEWIHAVEKTIRNIREGKFDKVVLAREARLSFADVIDPVVVLQQLREQQPFSYLFAFEQDGQCFIGASPEQLVKKEGDACYSICLAGSIRRGKTLQEDKQLGQWLMRDEKNLREHQFVVQMMKEAMGSVCKRVQIPASPQLLKLQHIQHLYTPVIGEKCHAASVLSIVEQMHPTPALGGTPREKAIKEIRETEPLDRGWYAAPIGWMDAEGNGEFAVAIRSGLFQGKEAFIFAGCGVVGDSDPMSEYEETKVKLTPMLSALGVERDE

SEQ ID NO: 94499 - protein, 462 aa, Parageobacillus toebii
  misc_feature (1)..(462): tr|A0A150N5H7|A0A150N5H7_9BACI Isochorismate synthase M enF OS=Parageobacillus toebii OX=153151 GN=menF PE=3 SV =1
MAILYQHKIQEQLHFIGKKANRPFISWSEEIDHVEPVYFFALGQACSFRQRFYWSDRTNETIYVGLGCTYIIETEEKEQRFRTVETKWNRWMAQTASYSNGTDATPIIFGGFSFDPFKPRTEKWRSFPHAKMIVPTVLLSIKKGKATLTVTMRSEQNEEMMEKIGVLIRLLYQGQEQRQTTSSLPPLITYKEVQKEEWIDAVKKTIENIRKGKFDKVVLAREARLSFADAIDPSVVLQQLLEQQPFSYIFAFEQEGQCFIGASPEQLVKKEKDTCYSICLAGSIRRGKTLQEDEQLGKWLMNDEKNLREHQFVVQMIKEAIEAVCKRVQIPSSPQLLKLQHIQHLYTPVIGEKCRAASVLSIVEQMHPTPALGGTPREKAIKEIREAEPLDRGWYAAPIGWMDAEGNGEFAVAIRSGLLQGKEASIFAGCGVVGDSDPMSEYEETKVKFTPMLSALGVERDE

SEQ ID NO: 94500 - protein, 464 aa, Paraliobacillus ryukyuensis
  misc_feature (1)..(464): tr|A0A366E729|A0A366E729_9BACI Isochorismate synthase M enF OS=Paraliobacillus ryukyuensis OX=200904 GN=menF PE =3 SV=1
MIETTQKPLDILIDKAMKTAKNQQIEQIISLTEKINDVDPFTFFDQAKVLGDNRFFWSSATDDFYLVGAGEAYTLQANTNAYYQIEQQWKHVLDRAFIHNSYRQPGTGFVAFGGFPFDPTESLSQVWDDFDGSHFRIPSYLLARHNGEFFLTMNIVVSPQDKKADLLEQIEQQKVILLSNTAAIQAQAKIAFTEEVYPMEWKETVKKATEEIKQGKAAKIVLARAMNLHFDSLPVIQSVLKELMRVQTRSFIFAYEQGDSCFIGATPERLVRVEQEQVFSACLAGTAPRGKTTGEDQHIADHLLHDRKNREEHDYVVEMIEHALTDACESVYVPDQPVIYPLKNLQHLYTPVTAKLKKDYSILDIVKNLHPTPALGGLPREASLSFIRSFEALERGWYGAPIGWFDANQNGEFGVAIRSGLLKGKTATLFAGCGVVKDSDPDAEYQETVMKFAPMRSALRGENT

SEQ ID NO: 94501 - protein, 459 aa, Parendozoicomonas haliclonae
  misc_feature (1)..(459): tr|A0A1X7APZ7|A0A1X7APZ7_9GAMM Isochorismate synthase M enF OS=Parendozoicomonas haliclonae OX=1960125 GN=menF PE=3 SV=1
MNPVNSQRPDALKQAIDSLTHSLSLAQPTSQWQRISVPVVGHEMGEVQFLPLLAGGAGLRLYWANRDNTLEVAVFGSALSFKQNTTDALSECQSALADVFQDMPSARVYGGLAFSSREDDHWPGFGGGELVLPEIELVRDQAGLTLSCHFIFDGSLSSVQHQQRLIDSLQSLHCADRFPTELPQAEITDEHPGWDYWQSCAAQALDALEEGRVAKVVLSREQTLALNGPLCPWTMLSALQSLNPNTYRFAFCQADGAVFFGASPECLYQRTENQLHSEALAGTTARNGDPVQDRRLAAALLTDDKNRRENALVMRSIQEALAQCSETVDTERDIELIRLKSVQHLRQRINARLNPETTDAQLLGLLHPTPAVGGLPKAEAHELIAELEDYPRGWYAGPFGTLHAQGAEFAVALRSARLEGQTLKLYSGAGLVPGSNINAEWAELDSKLRTIQSILDIEL

SEQ ID NO: 94502 - protein, 414 aa, Parvibacter caecicola
  misc_feature (1)..(414): tr|A0A4T9T6M2|A0A4T9T6M2_9ACTN Isochorismate synthase O S=Parvibacter caecicola OX=747645 GN=E5982_07955 PE=4 S V=1
MTRIYSYTQAIDADIVDAFCLLQKGFTDQFVYYRKEAPVRFMGLGRCVALPTLDEAEITLEGPVHAQPVFFSFNRFDGANPALADELFSSFPRLRLMLPEVVLIENERGTFLQVNSLGPVYAGRVQRFSRDCERAPERSAAPIPYQLEMDSREQWQEAMAQAGEALSEGRVRKVVLSRRLRLQAGHPFSSKDVLVNLIDGDAVGTVLLYRYADVFFCGCTPELLVRKNGCTVESMCLAGTCPAGADGEESAVLARQLMADRKNREEHQFVVDFIRTVFERTCYNVEIPAEPRIMRLAHVQHLFTPVKAQVLEGVSLWQLAEDLHPTPATAGAPVGEATMLIRRIEPYNRGFYAGACGYVDGAGDGEFSVALRTGVFDGEMGYVYGGCGIVEESDAQAEYEEINLKLRTILSAFG

SEQ ID NO: 94503 - protein, 424 aa, Pasteurella aerogenes
  misc_feature (1)..(424): tr|A0A448K4K6|A0A448K4K6_PASAE Isochorismate synthase M enF OS=Pasteurella aerogenes OX=749 GN=menF PE=3 SV=1
MDSFHFLKKQLIEKINAYQPQREEITVLQSQSEVEVNLLSWLKAQNAYPQFYLKRRDEAQTFAALGKVRSFSDTNLAQQFIEAHDLTLIGGLTFDGETLLYLPRLLLLQEKDQLTVLLFIDNRVDWATEKAQLLPLLETFVKTTALLPIQQSIYQHSPTASQAQWCQWVENALQHIQQGHAGKIVLANETLFHTKQPLCAKEVLAESEQYNVGCYHFLLARDAECSFIGSTPERLYQRDGDQLQTEALAGTAFMSEDEQLNRQQATWLLHDPKNIYENSLVVEDIQQNLRPFSTQIEVSELGIKQLRQVQHLRRQISAKLAENCGDSVCLQAIHPTAAVAGLPRQAAKQFLQQTETFQRSWYAGTLGFMRQQQAEFCVTIRSAFIEQNKIRVFAGAGIVEGSIPLLEWQEIERKALGLISLLQE

SEQ ID NO: 94504 - protein, 434 aa, Pasteurella bettyae
  misc_feature (1)..(434): tr|I3D6I6|I3D6I6_9PAST Isochorismate synthase MenF OS=P asteurella bettyae CCUG 2042 OX=1095749 GN=menF PE=3 SV =1
MDSLHSLQQQLMQQIDAHQPLDLKQDVVVFTAQVKAELNLLAWLKAQSDYPQFYLNSRVDSLSDNQHCLAAVGKVRSFSDINSAQAFIHNHALILVGGITFNGQSDFYVPRILLQQKDHQLIASLCIDNRLNWHNEKQSAVKCLEIFAKNTALLPLRQSVKLVSQRANQQQWCEWVEQALAEIQKGTFNKAVLANESLFESEDVIDAIDLLAESESKNTGCYHFLFAEQANSVFIGSSPERLYLRDGCDLKTEALAGTASMTENAEQNQKFGEWLLNDKKNEYENRLVVDDICGNIQAFTTQIEVQPIELKRLRVVQHLRRKIFAKLTALNGDEVCLKAIHPTAAVAGLPKQAALAFLKQIEIFDRSWYAGTLGFMSQVKSEFCVTLRSAFVEQNRIRIFAGAGIVAGSIPLLEWQEIERKASGLLSLLQSSGE

SEQ ID NO: 94505 - protein, 430 aa, Pasteurella caecimuris
  misc_feature (1)..(430): tr|A0A4S2E5P5|A0A4S2E5P5_9PAST Isochorismate synthase M enF OS=Pasteurella caecimuris OX=1796644 GN=menF PE=3 S V=1
MDSLEQATSQLSRQIEDYLRQKQSDIVCFQTDITNVNLLAWLKAQSIYPQFYLHFRDENKSLAAVGQVRSFSQLNLAQTFIEEYNFPIIGGLQFQGSGQFILPQLLLEENGNGTTISCFVEGKTSAQNTLTILKTLPKTTALCVLTKQPPLHTEQRANKRIWCDWVNQALYEIKQGGLIKLVLANETVFHLKQAINPYDFLAESQNQNQGCYHFLWAEKPYSTFVGSTPERLFAREYNLFLTEALAGTAPITADPKENQQQAEWLLNDEKNLNENWLVVQDISQNIHPMVESFDISEVELKPLRKVQHLLRKIRANLTAHYRDSVLLQAIHPTAAVSGLPQQQAKMILSEIETFERGWYAGTLGLMSKAYSEFCVAIRSAFIEGNQIRVFAGAGIVEGSEPLTEWQEIERKAEGLISLFAENNNGEKECL

SEQ ID NO: 94506 - protein, 432 aa, Pasteurella canis
  misc_feature (1)..(432): tr|A0A379ESA1|A0A379ESA1_9PAST Isochorismate synthase M enF OS=Pasteurella canis OX=753 GN=menF PE=3 SV=1
MDNLQTIKAQLITLINAYQPSENQEIALFQVQSMTSFPLLSWLKSQHNYPQFYLKIRDGSSTWASIGKVRSFSDVALAEQFVQTHDLSLVGGLQFYGETLFVLPRILLQQTQTSLTVTLFIDTQDFVQDKQRALDSLETFTKQSVLKPIQQPIQLLSQKANQAEWCHWVELGLQKIQQSELSKIVLANESCFKASTQLNPNDFLAESEKYNLGCYHFLFAESEKHAFIGSTPELLYRRQGLHLKTEALAGTAFMGDDLEQNQQQSDWLLHDKKNEYENKLVVDGICQNLHPFVQQIVVDDVELKKLRKVQHLRRKISAKLKAGCGDKDILLAMHPTAAVAGLPQLEAKQALRNLENFDRTWYAGTLGFMNASQADFCVTIRSAFIEQMENYSQLCVFAGAGIVEGSVPLLEWREIERKAAGLVSLLQQNHDK

SEQ ID NO: 94507 - protein, 432 aa, Pasteurella dagmatis
  misc_feature (1)..(432): tr|C9PQ52|C9PQ52_9PAST Isochorismate synthase MenF OS=P asteurella dagmatis ATCC 43325 OX=667128 GN=menF PE=3 S V=1
MDNLQLIKAKLIEQLEAYQPNGQDDIAVFEYQMNTDIVLLSWLKSQQVYPQFYLNIRNNSAKWACVGKVRSFSEVSQAQQFVEKYDLPLVGGLQFYGKTLFILPRLLLQQTQTGIFVSLYLNAKHFVEEKAQALACLDTFEKLTALNEIKQSIKLISQKANQAQWCEWVELGLAKIKQGELSKIVLANENCFETSNLLNEKDFLAQSERYNLGCYHFLFAEEPNKAFIGSSPELLYRRQGNLLKTEALAGTAFMSDDEEQNQQQSDWLLHDPKNEYENRLVVDGICQNLEPFVQHIEVEKVELKKLRKVQHLRRKISAVLNPDCGDTQLLHAMHPTAAIAGLPQLEAKQALRKLENFDRAWYAGTLGFMSKMQADFCVTIRSAFIEQMDNQSKLCVFAGAGIVEGSIPLLEWREIERKAIGLVSLLQQNKSE

SEQ ID NO: 94508 - protein, 422 aa, Pasteurella langaaensis
  misc_feature (1)..(422): tr|A0A2U0SL56|A0A2U0SL56_9PAST Isochorismate synthase M enF OS=Pasteurella langaaensis DSM 22999 OX=1122935 GN= menF PE=3 SV=1
MFESLAEKVKSHQVNPQSPMISVFQLEIAEFGDLLAWMKGQDTFPQYYLNFRDSVRKIAAIGKVRSFSDEISAQHFVASQDLTLVGGMTFAKQGHFWLPRLMIEQNAQGVRISVYMDNQADGAQEKREALNALKTLQHFTALEPLKQQVKLVSQKANQAQWCSWVERALIAIQQNKLTKVVLANESQFESAQPINAKDFLAESEKQNTGCYHFLYAENADCTFVGSTPERLFKRQGPQVKTEALAGTALMSDDEQQNQQQAAWLLQDRKNDEENLFVVKDICDNLQNVVTQVNVGKVELKQLRRVQHLRRQIEATLKPEFSDAACLQAIHPTAAVSGLPQQKAIAFLQNSENFDRTWYAGTLGVMSKQQGEFCVTIRCAFIEQNKIRIFAGAGIVEGSVPLLEWQEIERKASGLLTLLSSGE

SEQ ID NO: 94509 - protein, 431 aa, Pasteurella multocida
  misc_feature (1)..(431): sp|Q9CPI5|MENF_PASMU Isochorismate synthase MenF OS=Pas teurella multocida (strain Pm70) OX=272843 GN=menF PE=3 SV=1
MDNLQSIKAQFIAQINAYQPEKDRDIVVFQCNTETTFSLLAWLKAQQYYPQFYLHGRDGATKWASIGQVRQFSDVSAAAHFIQEQQLALLGGLQFYGDALFVLPRLLLQQRQDGMTITLFIDGKQFEQDKLVALACLSTFEKQTALQTVKQEISLISQKADQAEWCRWVEQGLQKIKQGELSKIVLANERCFKTAAPLAATDLLAESEKYNLGCYHFMLAESEQRAFIGSSPELLYRRHGLQLKTEALAGTAFMGEDEQQNQQQSDWLLHDKKNEYENQLVVDGICQNLQPFVQQITIEKVELKKLRKVQHLRRRISAQLKAGCGDKDILLAMHPTAAVAGLPQLEAKQALRKLENFDRTWYAGTLGVMGPAYADFCVTIRSAFIEQAENDSQLCVFAGAGIVEGSIPLLEWREIERKAMGLVSLLQQNQL

SEQ ID NO: 94510 - protein, 429 aa, Pasteurella skyensis
  misc_feature (1)..(429): tr|A0A1H7YH09|A0A1H7YH09_9PAST Isochorismate synthase M enF OS=Pasteurella skyensis OX=97481 GN=menF PE=3 SV=1
MTVFSQLKTQLKAKLHDVIENKHIHNGLVIIRVEQCCSVDNQLLLSWLKAQHSFPKYYWQNRDNTLTLTSIGAVKYFQDIEKAQQFSTNNHCTLIGGMQFSGETSFILPRLLFAKKEHKVTACLVVDSRNWEKEKIAIDQLFANFEKTIALEKTPYSLLDTAPYTNFQQWSDNIQNTIEHIKQGDFNKIVLANATDLICKEPISAYRLLALSKQKNYHCFHFLWQETQDVSFIGSSPERLYKREQQTLYTEALAGTAMVTGNQKQTEENGKWLLNDPKNNIENQYVVDDICDNLKSYAKEIEVKDTQLKQLPNVQHLCRLIKMELKDDVSDAQCLSHIHPTAAVAGLPRKKAIPFIAQTENFERNWYAGTLGFFNAEQAEFCVTLRSALINKNSMTVYAGAGIVQDSEPESEWKEIQRKALAMIKLLQQ

SEQ ID NO: 94511 - protein, 430 aa, Pasteurella sp.
  misc_feature (1)..(430): tr|A0A4Y9GX41|A0A4Y9GX41_9PAST Isochorismate synthase M enF OS=Pasteurella sp. WM03 OX=2558280 GN=menF PE=3 SV= 1
MGSLEQAKSQLSSQIETYLQQGKTDIVRFQATIANINLLAWLKSQTTYPQFYLRFRDENKVIAALGEVRSFCQLNIAQEFIETFDFPLLGGLQFQGYGQFILPQLMIEKNDKTITISCFVEGRASAQTALEQLKTLPKITALCELPKQIPLRTEQRANKQMWCDWVNQALYEIKQGELTKLVLANETVFHLKQAVNAYDFLAESECRNQGCYHFLWAESPHSTFVGSTPERLFAREYNLFLTEALAGTAPITADSKENQQQAEWLLNDEKNLNENWLVVQDISQNIKSMVESIDVSEVELKPLRKVQHLLRKIRANLTAHYRDSALLKAIHPTAAVSGLPQQQARMILSEIETFDRGWYAGTLGLMSEAYSEFCVAIRSAFIEGNRIRVFAGAGIVEGSEPLAEWKEIERKASGLITLFAENNNGEKECL

SEQ ID NO: 94512 - protein, 434 aa, Pasteurella testudinis
  misc_feature (1)..(434): tr|A0A1W1UAG9|A0A1W1UAG9_9PAST Isochorismate synthase M enF OS=Pasteurella testudinis DSM 23072 OX=1122938 GN=m enF PE=3 SV=1
MDCWQQLKQQLLQLLQNHQVVADQAITQYQFCIALPPDCGNVLAWLKGQPHYPRFFWQARESESQCVALGEVQRFSQLDAAQQFLNQHADQPLHLVGGLTFEGEASFYLPRLWLEQCAERLKVTFSLSATDRQSAVYAFIEGLQGAQTLNAVTAGLYPGEQNYSQTQWQDLVQESLDCIAQGRFTKVVLAQKKTFALSEALDPHDLLAQARRQQPCCYYFLWAQSAQSAFLGISPERLYRRQRQTLFTEALAGTAEYGGDQRQNQQQQQWLLQDGKNIHENRLVVEDICAKLSNLSQHLDIGELSSRTLRYVQHLVRNIGAKLYPEVDDQACLTAIHPSAAVGGLPYAAALKFIAERQNFKRDWYAGTLGVMSLASSEFCVAIRSTLLSKDPQEQDKIAIFSGAGIVAGSVPLLEWQEIERKAAGILSLFPTSG

SEQ ID NO: 94513 - protein, 419 aa, Pasteurellaceae bacterium
  misc_feature (1)..(419): tr|A0A1V3TSV3|A0A1V3TSV3_9PAST Isochorismate synthase M enF OS=Pasteurellaceae bacterium 15-036681 OX=1924934 G N=menF PE=3 SV=1
MSIFNQLKQQLSQKLNSLQATQGLIQLQAEVDLTVENAELLAWLKGQNTFPHYFWQHRDTDQTIVAIGQIRLFKDLELAEAFSQQHNLLLVGGAQFDGEATFVLPQLLLVKNSQKVTACLNVDLEKPIDLDTLFLAAKPLQEFQANQLIDSQLACAPNCWQQNIALALEEIEQYHFSKVVLANAKTLSFNNPINPYDLLLASQHKNLGCYHFLWSETGEQIFIGSTPERLYQRNDRQFYTEALAGTVAVTEDREETERNALWLLSDQKNIYENLLVVDDICSHLADCTSDIQVGDAEIKRLHNVQHLRRQIHTTLADNVSDADCLARIHPTAAVAGLPRSEAKQFIAQHEAFKRGWYAGTLGYISPKNAEFCVTLRSALIQQNQITIYAGAGIVEGSDPQSEWLEIERKSLAMAGLLRF

SEQ ID NO: 94514 - protein, 485 aa, Patulibacter medicamentivorans
  misc_feature (1)..(485): tr|H0E631|H0E631_9ACTN Menaquinone-specific isochorisma te synthase OS=Patulibacter medicamentivorans OX=109766 7 GN=PAI11_22810 PE=4 SV=1
MAPVAGVSSAQAPAVPIADDDRDRLLRHAAEARKRARRSRRDAVLASITIDVDPAIDPSAVVAVGRRAGEPWTVFEQRDRDRRVVATLGVVQAIEAAGPQRFTTVARRWEALAADAVGDLGTGLDGEGLLAVGGFAFTDEGATTPAWDGFAAASLHVPLLGIAGCGGRIRATVAVRVAAADGDLTAIVDAALERVAALAPARPPLLDPDPVQRGRVVSALPPAHYEEAVARGVQRIRAGEMEKIVLAREVQVTGRPTPDPAAILGVMREAYAGCCVLAVGRGDRTFVAATPELLVRREGHRLATLALAGTTRRSSDPAVEAHLGEHLMRSAKDRGEHAIVVRRILARLDALALWTTAAEQPQIVQAASVQHLATPIRAQLASPIPVVELAGRLHPTPAVGGFPEAVALPLIPAIEGMDRGWYAGPVGWTDSAGDGELCVALRSALLEPELARCFAGVGVVSDSDPAAELAETEAKLQALLPLLAA

SEQ ID NO: 94515 - protein, 440 aa, Pectobacterium actinidiae
  misc_feature (1)..(440): tr|A0A1V2R786|A0A1V2R786_9GAMM Isochorismate synthase M enF OS=Pectobacterium actinidiae OX=1507808 GN=menF PE= 3 SV=1
MKQLSDLLRHMQQDLREPLPERAGFRQITRSLVLSDASELLPWLATQPVYPQFYWQHRQDREEAAVCGNVCGFRHIQDAEAFLAQQPCDSDVRIWGLNAFNQTKEGGVSSPGYLFLPRVELRRQDDTLSLSINLFSDTSLQQDAVEASAFLNLLLPPASQPLLHAEVQSVGHQPARQGWITLLQRALHDINNGLMEKVVLARATTLTLTQPLQATTFMAASRAANHHCFHFMLAHDARHAFLGSSPERLYRRRGSELETEALAGTVASDRDAHKAAELADWLMNDTKNQCENMLVVDDICQRLQQSALSLDVMPPEIVRLRKVQHLRRTIHATLRNASDSVCLNALQPTAAVAGLPRQEARRFIAEHESFERNWYAGSAGYLSRQQSEFSVALRSAEVRDHILTLYAGAGIVAGSDPEQEWQELENKAAGLRSLLDGDMS

SEQ ID NO: 94516 - protein, 440 aa, Pectobacterium aquaticum
  misc_feature (1)..(440): tr|A0A426IQE6|A0A426IQE6_9GAMM Isochorismate synthase M enF OS=Pectobacterium aquaticum OX=2204145 GN=menF PE=3 SV=1
MKQLSDLLRHLQQALREPQPECAGFRQITRSLRLSETSELLPWLATQPVYPQFYWQHRQDREEAAVCGNVCGFRHIQDAEAFLVQQQCDPDVRIWGLNAFNQTKEDGVAPPSYLFLPRAELRRQDDTLSLSINLFSDTSLQQDAVEASAFINLLLPPASQPLLHAEVQSVGHQPERQGWIDLLQRALHDINTGLMEKVVLARATTLTLTQPLQATTFMAASRAANHHCFHFMLAHDARHAFLGSSPERLYRRRGTELETEALAGTVASDRDAHKAAELADWLMNDTKNQCENMLVVDDICQRLQQSALSLDVMPPEIVRLRKVQHLRRTIHATLRTASDSACLNALQPTAAVAGLPRQEARRFIAEHEPFERGWYAGSAGYLSLQQSEFSVALRSAEVRDHVLTLYAGAGIVAGSDPEQEWLELENKAAGLRSLLDGDMS

SEQ ID NO: 94517 - protein, 440 aa, Pectobacterium atrosepticum
  misc_feature (1)..(440): tr|Q6D7W5|Q6D7W5_PECAS Isochorismate synthase MenF OS=P ectobacterium atrosepticum (strain SCRI 1043 / ATCC BAA -672) OX=218491 GN=menF PE=3 SV=1
MKQLSDLLRHLQQDLREPQPECAGFRQITRSLTLSDASELLPWLATQPVYPQFYWQHRQDREEAAVCGKVCGFRHIQDAEAFLVQQQCDPDVRIWGLNAFNQAKEEGVSSPGYLFLPRAELRRQDDMLSLSINLFSETSLQQDAAEASAFINLLLPSASLPLLHAEVQSVGHQPERQGWIDLLQRALHDINTGLMEKVVLARATTLTLTQPLQATTFMAASRAANHHCFHFMLAHDARHAFLGSSPERLYRRRGSELETEALAGTVASDRDAHKAAELADWLMKDTKNQHENMLVVDDICQRLQQSALSLDVMPPEIVRLRKVQHLRRTIHATLRTASDSACLDALQPTAAVAGLPRQEARRFITAHEPFERRWYAGSAGYLSRQQSEFSVALRSAEVRDHVLTLYAGAGIVAGSDPEQEWQELENKAAGLRSLLDGDMS

SEQ ID NO: 94518 - protein, 447 aa, Pectobacterium betavasculorum
  misc_feature (1)..(447): tr|A0A093S1E9|A0A093S1E9_9GAMM Isochorismate synthase M enF OS=Pectobacterium betavasculorum OX=55207 GN=menF P E=3 SV=1
MKQLSDLLRHLQQDLREPQPERAGFRQITRSLTLCDTSETLSDASELLPWLATQPVYPQFYWQHRQDREEAAVCGKVCGFHHLQDAEAFLVQQQCDPDVRIWGLNAFNQITEGGTSSPGYLFLPRAELRRQDDMLSLSINLFSETSLQQDADEASAFINLLLPPEPLPILHAEVQAVGHQPERQGWIDLLQRALHDINSGLMEKVVLARTTTLTLTQPLQATTFMAASRAANHHCFHFMLAHDARHAFLGSSPERLYRRWGRELETEALAGTVASDRDALKAAELASWLMKDTKNQHENMLVVDDICQRLQQSALSLDVMPPEIVRLRKVQHLRRTIHATLRTASDSACLDALQPTAAVAGLPRQEARRFIAAHEPFERGWYAGSAGYLSRQQSEFSVALRSAEVRDHVLTLYAGAGIVAGSDPEQEWQELENKASGLRSLLDGDMS

SEQ ID NO: 94519 - protein, 440 aa, Pectobacterium brasiliense
  misc_feature (1)..(440): tr|A0A0M2F3S2|A0A0M2F3S2_9GAMM Isochorismate synthase M enF OS=Pectobacterium brasiliense OX=180957 GN=menF PE= 3 SV=1
MKQLSDLLRHLQQDLREPQPERAGFRQITRSLTLSDASELLPWLATQPVYPQFYWQHRQDREEAAVCGNVCGFRHIQDAEAFLVQQQCDPDVRIWGLNAFNQTKEGGASSPGYLFLPRAELRRQDDTLSLSINLFSDTSLQQDAIEASAFINLLLPPAPQPLLHAEVQSVGHQPERQGWIDLLQRALHDINAGLMEKVVLARATTLTLTQPLQATTFMAASRAANHHCFHFMLAHDARHAFLGSSPERLYRRRGSELETEALAGTVASDRDARKATELADWLMNDTKNQCENMLVVDDICQRLQQSALSLDVMPPEIVRLRKVQHLRRTIHATLRTASDSACLNALQPTAAVAGLPRQEARRFIAEHEPFERGWYAGSAGYLSRQQSEFSVALRSAEVRDHVLTLYAGAGIVAGSDPEQEWQELENKAAGLRSLLDGDMS

SEQ ID NO: 94520 - protein, 442 aa, Pectobacterium carotovorum
  misc_feature (1)..(442): tr|C6DBP1|C6DBP1_PECCP Isochorismate synthase MenF OS=P ectobacterium carotovorum subsp. carotovorum (strain PC 1) OX=561230 GN=menF PE=3 SV=1
MTVKQLSDLLRHLQQDLREPQPERAGFRQITRSLTLSDTSELLPWLATQPVYPQFYWQHRQDREEAAVCGNVCGFRHLQDAEAFLAQQQCDPNVRIWGLNAFNQIKESGTSSPGYLFLPRAELRRQDDTLSLSINLFSDTSLQQDAAEASAFLNLLLPPAPSPLLHAEVQSVGHQPERQGWIDLLQRALHDIKAGLMEKVVLARTTTLTLTQPLQATTFMAASRAANHHCFHFMLAHDARHAFLGSSPERLYRRRGSELETEALAGTVASDRDAHKAAELGDWLMNDTKNQCENMLVVDDICQRLQQSALSLDVMPPEIVRLRKVQHLRRTIHATLRTASDSACLNALQPTAAVAGLPRQEARRFIAEYEPFERGWYAGSAGYLSRQQSEFSVALRSAEVRDHILTLYAGAGIVAGSDPEQEWQELENKAAGLRSLLDGDMS

SEQ ID NO: 94521 - protein, 440 aa, Pectobacterium odoriferum
  misc_feature (1)..(440): tr|A0A094TJ05|A0A094TJ05_9GAMM Isochorismate synthase M enF OS=Pectobacterium odoriferum OX=78398 GN=menF PE=3 SV=1
MKQLSDLLRRLQQDLREPQPERAGFRQITRSLALSDASELLPWLATQPVYPQFYWQHRQDREEAAVCGNVCGFRHIQDAEAFLAQQQCDSDVRIWGLNAFNQTKEDDVASPGYLFLPRAELRRQDETLSLSINLFSDTSLQQDAVEALAFINLLLPPASQPLLHAEVQSVGHQPERQGWIDLLLRALHDINTGLMEKVVLARATTLTLTQPLQATTFMAASRAANHHCFHFMLAHDARHAFLGSSPERLYRRLGSELETEALAGTVASARDAHKAAELADWLMNDTKNQCENMLVVDDICQRLQQSALSLDVMPPEIVRLRKVQHLRRTIHATLRTASDSACLNALQPTAAVAGLPRQEARRFIAEHEPFERGWYAGSAGYLSRQQSEFSVALRSAEVRDHVLTLYAGAGIVAGSDPEQEWQELENKAAGLRSLLDGDMS

SEQ ID NO: 94522 - protein, 442 aa, Pectobacterium parmentieri
  misc_feature (1)..(442): tr|A0A0H3I7V6|A0A0H3I7V6_PECPM Isochorismate synthase M enF OS=Pectobacterium parmentieri OX=1905730 GN=menF PE =3 SV=1
MTVKLLSDLLRHMQQDLREPQPERAGFRQITCSLSLSEASELLPWLATQPVYPQFYWQHRQDREEVAVCGKVCGFRHIQDAEAFLVQQQCDPDVRIWGLNAFNQSKEEGASSPGYLFLPRAELRRQDDTLSLSINLFSETSLQQDAVEASAFINLLLPPASQPLLHAEVQSVAHQPERQGWIDLLQRALHDINTGLMEKVVLARATTLTLTQSLQATTFMAASRAANHHCFHFMLAHDARHAFLGSSPERLYRRRGSELETEALAGTVASDRDALKAAELADWLMKDTKNQCENMLVVDDICQRLQQSALSLDVMPPEIVRLRKVQHLRRTIHATLRTASDSACLNTLQPTAAVAGLPRQEARRFIAAYEPFERGWYAGSAGYLSRQQSEFSVALRSAEVRDHVLTLYAGAGIVAGSDPEQEWQELENKAAGLRSLLDGDMS

SEQ ID NO: 94523 - protein, 440 aa, Pectobacterium peruviense
  misc_feature (1)..(440): tr|A0A0J5XV69|A0A0J5XV69_9GAMM Isochorismate synthase M enF OS=Pectobacterium peruviense OX=2066479 GN=menF PE= 3 SV=1
MKQLSDLLRHLQQDLREPQPERAGFRQITRSLTLSEASELLPWLATQPVYPQFYWQHRQDREETAVCGKVCGFHHLQDAEAFLVQQQCDPDVRIWGLNAFNQIKEGSTSSPGYLFLPRAELRRQDDTLSLSINLFSETSLQQDADEASAFINLLLPPASLPILHAEVQSVGHQPERQGWIDLLQRALHDIKAGLMEKVVLARATTLTLTQSLQATTFMAASRAANHHCFHFMLAHDARHAFLGSSPERLYRRRGRELETEALAGTVASDRNVLKAAELASWLMKDTKNQHENMLVVDDICQRLQQSALSLDVMPPEIVRLRKVQHLRRTIHATLRTASDSACLDALQPTAAVAGLPRQEARRFIAAHEPFERRWYAGSAGYLSRQQSEFSVALRSAEVRDHVLTLYAGAGIVAGSDPEQEWQELENKAAGLRSLLDGDMS

SEQ ID NO: 94524 - protein, 440 aa, Pectobacterium polaris
  misc_feature (1)..(440): tr|A0A3A4AZ56|A0A3A4AZ56_9GAMM Isochorismate synthase M enF OS=Pectobacterium polaris OX=2042057 GN=menF PE=3 S V=1
MKQLSDLLRHLQQDLREPQPERAGFRQITRSLTLSDASELLPWLATQPVYPQFYWQHRQDREEAAVCGNVCGFRHIQDAEAFLVQQQCDPDVRIWGLNAFNQTKEDGAASSGYLFLPRAELRRQDDTLSLSINLFSDTSLQQDAVEASAFINLLLPPASQPLLHAEVQSVGHQPERQGWIDLLQRALHDINAGLMEKVVLARATTLTLTQPLQATTFMAASRAANHHCFHFMLAHDARHAFLGSSPERLYRRRGSELETEALAGTVASDRDARKAAELADWLMNDTKNQCENMLVVDDICQRLQQSALSLDVMPPEIVRLRKVQHLRRTIHATLRTASDSACLNALQPTAAVAGLPRQEARRFIAEHEPFERGWYAGSAGYLSRQQSEFSVALRSAEVRDHVLTLYAGAGIVAASDPEQEWQELENKAAGLRSLLDGDMS

SEQ ID NO: 94525 - protein, 398 aa, Pectobacterium polonicum
  misc_feature (1)..(398): tr|A0A4U7KDL1|A0A4U7KDL1_9GAMM Isochorismate synthase O S=Pectobacterium polonicum OX=2485124 GN=EDI29_14845 PE =4 SV=1
MDTLITETETFSGLTYSEQTAFLYASEHRSLSTSGLFERISSPVCAPGSHDDRLSSAIAQAFQRARQAGQSLPIVVGAIPFDTTQPSCLYIPDSYTVTTKSELVSRARKYTTAAPKASTLNSVPDECQFKSIVAEAVERFRRGELSKAVLSRILDIELTEPVKAQTILNNLMVQNAGGYHFSLPLPDGSVLLGASPELLLRKQGSVIVSNPLAGSARRMSDEHLDYLNSQRLLHSGKDKHEHKLVVDDIRQRLMPLCVSLTIPSAPSLMSTASMWHLSTAIRGELVNPEMTALQVACQLHPTPALCGFPTQEARQLIAELEPHDRGVFSGIVGWCDANGDGEWAIAIRCGTIKHNKVRLFAGAGIVEASVPEDEWAETAAKLNTMLNAFGLNSGVDGL

SEQ ID NO: 94526 - protein, 440 aa, Pectobacterium punjabense
  misc_feature (1)..(440): tr|A0A2T3W0P7|A0A2T3W0P7_9GAMM Isochorismate synthase M enF OS=Pectobacterium punjabense OX=2108399 GN=menF PE= 3 SV=1
MKQLSDLLRHMQQDLREPQPERAGFRQITRSLRLSEAAELLPWLATQPVYPQFYWQHRQDREEVAVCGKVCGFRHIQDAEAFLVQLQCDPDVRIWGLNAFNQSKEEGASSPGYLFLPRAELRRQDDTLSLSINLFSETSLQQDAVEASAFINLLLPPAPLPLLHAQVQSVAHLPERQGWIDLLQRALHDIKTGLMEKVVLARATTLTLTQPLQATTFMAASRAANHHCFHFMLAHDARHAFLGSSPERLYRRRGSELETEALAGTVASDRDAHKAAELADWLMKDTKNQCENMLVVDDICQRLQQSALSLDVMPPEIVRLRKVQHLRRTIHATLRTASDSACLNTLQPTAAVAGLPRQEARRFIAANEPFERGWYAGSAGYLSRQQSEFSVALRSAEVRDHVLTLYAGAGIVADSDPEQEWQELENKAAGLRSLLDGDMS

SEQ ID NO: 94527 - protein, 440 aa, Pectobacterium wasabiae
  misc_feature (1)..(440): tr|A0A1D7Z3W9|A0A1D7Z3W9_9GAMM Isochorismate synthase M enF OS=Pectobacterium wasabiae CFBP 3304 OX=1175631 GN= menF PE=3 SV=1
MKLLSDLLRHMQQDLREPQPERAGFRQITRSLSLSEASELLPWLATQPVYPQFYWQHRQDREEVAVCGKLCGFRHIQDAEAFLIQQQCDPDVRIWGLNAFNQVKEEGASSPGYLFLPRVELRRQDDTLSLSINLFSETSLQQDAVEASAFINLLLPPASQPLLHAEVQSVAHQPERQGWIDLLQRALHDIKTGLMEKVVLARATTLTLTQPLQATTFMAASRAANHHCFHFMLAHDARHAFLGSSPERLYRRRGSELETEALAGTVAGDRDALKAAELADWLMKDTKNQCENMLVVDDICQRLQQSALSLDVMPPEIVRLRKVQHLRRTIHATLRTASDSACLNILQPTAAVAGLPRQEARRFIAAYEPFERGWYAGSAGYLSRQQSEFSVALRSAEVRDHVLTLYAGAGIVAGSDPEQEWQELENKAAGLRSLLDGDMS

SEQ ID NO: 94528 - protein, 363 aa, Pedobacter sp.
  misc_feature (1)..(363): tr|A0A519WVX9|A0A519WVX9_9SPHI Isochorismate synthase O S=Pedobacter sp. OX=1411316 GN=EOO85_12330 PE=4 SV=1
MNDLFEKIKSQLNSKYPFAIYCKPGSSTATGIFQNDNVMDYKADFTREGFVFAPFHDGKRLFIPTEAAEINRFEIEPEVTKSELYGIIIDQKEKNDFELIVREAVGEINNSELQKVVLSRKQEISGSVDIEKTFKKILQAYPKAFRYCFYHPVSGMWMGATPERLLNLEGIEMSTVALAGTQLYKEGEEAVWEEKEKLEQKFVTDFITDSIGDYVTDIYKTEPYTFRAGNIVHIRTDISGKVKDASNLSELIEALHPTPAICGLPRDTALRFIQKNEKYEREYYSGFLGEINFDQERAGMVQTDLFVNLRCMKLQKSKVSLFVGCGIIKNSNPEKEFVETVNKATTMASVLTLKDTVEMHNSF

SEQ ID NO: 94529 - protein, 435 aa, Pelagibacterium sp.
  misc_feature (1)..(435): tr|A0A369W1T3|A0A369W1T3_9RHIZ Isochorismate synthase O S=Pelagibacterium sp. XYN52 OX=2282655 GN=DVH29_14655 P E=4 SV=1
MSIRVMLRRRVVRREALPAASTRCFGRIGPFAIIQAHMTAQARRGRMTINSVPNRTQQMPDPAPHALFRSANSQFSTQGVGAALPAGPLDTLGARVRDFFRTADGPQVLLGTLPFDRAQPDCLFQPQAIADIVPQPPLAAVAQHGRWRVTAHPSQAEYGAMVDRALERIASDAGLNKVVLARTLVVETDAALDPRSVAMRLGRDPSITTFVMPVSLDGPARTLVGATPELLLQKKGRAIRSSPLAGSAKREADRSVDREAAEALAASDKNRREHAVVVEAIMDALAPCCAQLTAPDGPALHATASMWHLGTPIEGRLRDDDISCADLLARLHPTPAICGVPRERAQALIRELEPFDRGFYAGAVGWTDASGDGEWHIALRCGEIADRRITLFAGAGIVAGSDPAAEIAETSAKFLALLHALGIDEHGRPLDGVDS

SEQ ID NO: 94530 - protein, 470 aa, Pelagibaculum spongiae
  misc_feature (1)..(470): tr|A0A2V1H0R0|A0A2V1H0R0_9GAMM Isochorismate synthase M enF OS=Pelagibaculum spongiae OX=2080658 GN=menF PE=3 S V=1
MTQFIPGYSRACASLDQQLIDTKKRINPLDQRRLIRLETPVEPISALEWLQAQRMLPRTYWRDRDGKAIRAGIGYAVKMPVNVAEVSPLLKTASELLKNCDGDAAIMSAFSFDQQATQWGGFGCGQMVLPRIELVEKNQRHVLAINLLLEPGQVDAELNRARKSLASLQYPTGLPELPMLLGQPVHHPAYNGWQDRVKQLLQAFKRGDMQKVVLSRCSEWKAAHALSPWRLLADWGQREAESFRFGWQLNDRDAFVSCTPERLFQRRGLLLRTEALAGTAPRSEGKAEDQALAQALLNDSKNGHENRLVLEDIHNRLQPLCQQLEHSQDMSLVRLSKVQHLRHTLRGVLKKDSDADLLQTLHPTPAVGGVSRENAMAWLRKHEGYFRGWYAGAAGCIKADSSEFCVTIRSVRIKEGSLQAFAGAGIVAGSNPQAEWQEINAKTSALLSLFKQEDPCLSPVQHPMQAIDQR

SEQ ID NO: 94531 - protein, 473 aa, Pelodictyon luteolum
  misc_feature (1)..(473): tr|Q3B611|Q3B611_PELLD Isochorismate synthase MenF OS=P elodictyon luteolum (strain DSM 273 / 2530) OX=319225 G N=menF PE=3 SV=1
MSDHHIIITPTETPLPIAQAAEAIQTALQQHGRDGANPLHPPGTLMLFRQPLQPSDPAKWLAAQNIRPRIFWRNREQDYAAAGIGVADRITYSGREQNSSAFRILGESMAQKSRAARYFGGISFNNIEQQDHDWKNFPAFSFILPLLELSMENGACTLTCHILAGTPDETLARIEDARTLIASLPSDAGDNGERLPAVTGRSCSPDREGWIRNCGKAIATFEDGSTEKIMLARKTTLEFASACNPMLFLLRHPYPQNSTYRFYFEPEEGCAFLSFTPERLYRRDGSRLLTEALAGTCSKEGADLTDEHASRALLGSEKDIREHRFVKDMIYNELLPACSQIEMEDEVQVLQLNRLAHLYTRCSAVLKPECTDDGEVLSILHPTPAVGGVPKEEAMRHIMELEPFSRGWYAAPVGWIMRDAAEFAVGIRSALVNGTTASLYSGAGLVRGSDPELEWDEVEQKIGDLLAITEDKA

SEQ ID NO: 94532 - protein, 468 aa, Pelodictyon phaeoclathratiforme
  misc_feature (1)..(468): tr|B4SET4|B4SET4_PELPB Isochorismate synthase MenF OS=P elodictyon phaeoclathratiforme (strain DSM 5477 / BU-1) OX=324925 GN=menF PE=3 SV=1
MIIPSEEPLSIEKAVSSLASALALYGDKHVEPDQREQHLLVTFRQPLQPTEPDEWLSSQSVYPRLFWMNRERDFSVAGIGIADSIACEGAGNNGDNFRQFALSVKDKNPDARYFGGFRFNNEEKQDPIWQPFSSFSFVLPLLQLTFENGAFALSCHLWVEIGDDIHKKISALTDLLDRVVTDTNSTVMKLPELLHLSYNPDEKEWMEECRKALLTFESGEMEKIMLARQTTLEFTSIFSPLLFLLHYPYKQNTIFRFYFEPAPNHAFFSFTPERLYRRDGNMLLTEALAGTCSKESINGDDHLASEVLLNSEKDIREHNFVREMIYQELQKICSNIDMEKEVNVLQLNRLAHLYTRCTAQLKPEFEYDSAILQLLHPTPAVGGVPKAPAMQHIMELEPFSRGWYAAPIGWVSRDAAEFCVGIRSALVHGRFAYLYSGAGLVKGSNPFAEWEEVDQKIGDILAISRQEA

SEQ ID NO: 94533 - protein, 411 aa, Pelosinus fermentans
  misc_feature (1)..(411): tr|I8U1V8|I8U1V8_9FIRM Isochorismate synthase OS=Pelosi nus fermentans JBW45 OX=1192197 GN=JBW_01671 PE=4 SV=1
MKHQSNSAVLEKQLLNDYQVGDFFFTSPKRTLLGKGSFAVVPSDKEKENQLECLAERVLAALENAKEHGYSNPVVVGAVPFDYKKNVQLIVPETIKLSTPSQFDSINPLKSSMASTYEIKSVPEPAQYKEGVEKGIHYIETGHLSKIVLSRSLHLTSSTTVDIHQLLHNLAQHNTLGYTFAVDLPKNISDKSGLNVSFSTGRTLIGASPELLVTKTGLHLMANPLAGSRPRSEDPGEDQRLAAELLSSTKDLHEHKVVVSAVAAALRPYCLTLDVPEEPSLMHTETMWHLSTVIKGEIKRPSTSSLELAIALHPTPAVCGSPTELAREAIGEIEPFDRGFFAGMVGWCDANGDGEWAVTIRCAEVEARSLRLFAGAGVVAESTPEEELTETSAKFRTMLFAMGLSKDVVYK

SEQ ID NO: 94534 - protein, 380 aa, Pelotomaculum schinkii
  misc_feature (1)..(380): tr|A0A4Y7R8M5|A0A4Y7R8M5_9FIRM Salicylate biosynthesis isochorismate synthase OS=Pelotomaculum schinkii OX=783 50 GN=pchA PE=4 SV=1
MKYQKTEVKLDNSLSFWKHFDKEERVLFYNPLNNELIIGAKRLKTFGQEENYNNYLYVFSSRTFFDSVKDQKWAEFGNETVAFEYYLVEKKGKQTLYYFEDLVEIENLKIKSNEHFYNISADDYEEWKELFANVYYEISSRKVNKVVISREVKIVCETLVNTESVLKNLLEKNQNSFIFAYFKNGKTFLGATPEILVQKEKDNIISYALAGTILRNDEDDELQKMMLLNDRKNRYEHQIVIDKIADVMKQYIRDVIIDEIKILTLKNLHHLQTRIYGKDNSTLSEWVTRLHPTPALGGNPAYKALEIIKKYEKHERGLYAAPIGIMDENGDGIFVAGIRSALICKNMVFAYTGGGIVDKSECEAEYIETNNKLKTIIESL

SEQ ID NO: 94535 - protein, 380 aa, Pelotomaculum sp.; identical to SEQ ID NO: 94534
  misc_feature (1)..(380): tr|A0A4Y7S875|A0A4Y7S875_9FIRM Salicylate biosynthesis isochorismate synthase OS=Pelotomaculum sp. FP OX=26147 4 GN=pchA PE=4 SV=1

SEQ ID NO: 94536 - protein, 128 aa, Peptoniphilus duerdenii
  misc_feature (1)..(128): tr|E0NK91|E0NK91_9FIRM Chorismate binding enzyme OS=Pep toniphilus duerdenii ATCC BAA-1640 OX=862517 GN=irp PE= 4 SV=1
MEVLERGSVQHLASRLKGTLKEEFNEWHAFTTLFPAVTASGIPKTECIDAIDRLEKDERGLYSGGVLTYDQNGTMDVALALRTAFQTDKETWIRVGAGIVKLSKAERELEETKEKAGSILDKLVYIED

SEQ ID NO: 94537 - protein, 357 aa, Petrimonas mucosa
  misc_feature (1)..(357): tr|A0A1G4G4P1|A0A1G4G4P1_9PORP Vibriobactin-specific is ochorismate synthase OS=Petrimonas mucosa OX=1642646 GN =vibC PE=4 SV=1
MIGEEKSLTLDRLIERDACFAIYRLPGEPTPRFVMQGDRHPLLLNDIGALNRQQGFVMAPFRVTDSSPLILIRPDFTDLDNVTIPSAGENGVKPVEKDAKRYRRADYNLLFHRFHKPLLSGEIEKLVLSRNKRIEREETFSPGKSFFKAAEKYPRSFVYLLHTPQSGTWLGSTPEILLAGSHNNWQTISLAGTRYPNSGNVSWDDKNLREQHLVTSYILKQLTSFHISPEINGPYTIKAGALAHLRTDFSFSLPDKAVIGSLLKALHPTPAVSGLPKEQAFQFITEHEGYDRRYYTGFLGMLDPSAETTLYVNLRCMQIGKNHLTLYAGSGLLASSTCREEWKETEQKLKTMASIVK

SEQ ID NO: 94538 - protein, 423 aa, Phocoenobacter uteri
  misc_feature (1)..(423): tr|A0A379C954|A0A379C954_9PAST Isochorismate synthase M enF OS=Phocoenobacter uteri OX=146806 GN=menF PE=3 SV=1
MLFNQLKQQLEYELTQIIPNKGLIKIEVQSNKKAENTLFLRWLNAQSIFPKFYWQNRDDNLTLTAIGTVKSFDNIQQAQQFNQQNNNTLLGGIKFCGQTTFILPRLLFAKNQKKMTACLMVDTDHLDTEIPQIHDILEKFDNASTLNQTQYTILETTQATDFSQWSRNIQSAIEKIKQGCFNKVVLANATNFKCKETISAYELLALSQQKNQHCFHFLYQEDRYSAFIGSSPERLYKREQQRFYTEALAGTVAVTEDPTQTEKNGQWLLNDSKNTLENQYVVDDICSHLAPYISSVIVSDIHLKRLPKVQHLRRFIEMQLKENISDIDCLNQIHPTAAIAGLPRPNAIEFINQTENFKRQWYAGTLGFFNQAQAEFCVTLRSAQINKNTITIYAGAGIMQDSDPHSEWQEIERKALAMAELLK

SEQ ID NO: 94539 - protein, 537 aa, Phormidesmis priestleyi
  misc_feature (1)..(537): tr|A0A0P7ZM53|A0A0P7ZM53_9CYAN Menaquinone-specific iso chorismate synthase MenF OS=Phormidesmis priestleyi Ana OX=1666911 GN=menF PE=4 SV=1
MPVVQHEIDIFDTSYERARSLRFLTCAQQQAIQLGQAKIASLTFMARPIAPWVVLSALGEPSERHAYYDSPQPLSMVGIGVAVAFEAAGTNRFSRSQDFINFWQRQFLYAEPVRYSRLSALSAPDSSVTPLSNQLPNQLPNYLAPSRSPVTDLAARQAERQRGHFFFSATFFAEPVPEPDPEPPKEPTEESPEELTGQPAEFEPAYVFVPKIQVQTSAEASVVTFNCLVSPTTDVSSAVDWMYERLRRLITAEQISYRPVGYLGGRSVAKDVANFENAVTAALKQVQAKKLHKVVLADVMDVVVAQPVDVVRSLQALRRHHPDCTVFSVGNGRGQSFIGASPERLLTITQGQLTTEALAGTTSRAVNRGIDWQLGQTLLHSQKERYEHRVVVEFIVEQLRSLGLNPHYAASPQLLRLLHVQHLHTPISAALNSPQSVQPLEVLAKLHPTPAVAGVPPQRACEFIRQHERFNRGLYTAPFGWIDTEGNSEFIVGIRSALIDGCKARLYAGAGIVAGSEPAKELAEIKLKLQTLLNALV

SEQ ID NO: 94540 - protein, 473 aa, Phormidium sp.
  misc_feature (1)..(473): tr|A0A0P8BZK5|A0A0P8BZK5_9CYAN Menaquinone-specific iso chorismate synthase MenF OS=Phormidium sp. OSCR OX=1666 905 GN=menF PE=4 SV=1
MVVQPSPTQCFKNCQDIERFLFNCQQKLAKTGRSHWLSLRIILPDLDPLMAFDQHHRCDRPSFYLENPSQQQAIAAWGSCCETIANGPQRFQQIQAFVQDCQENATLINPRLGQSPGLQIFCSFSFFDDGANRLFPAASAFLPQWQLSHQQGQTLATCNLPLSHHSDLARLSQDTWQTLQQLRSLPSRSLSRDPQRVPQAVSCDWRDIQQFQTNVQRALGAIEAKHLQKVVLSHAIDLQARSPFHLTTALAQLRHRYPDCYSFAVGNGNGQYFIGASPERLLGSRDRQLVADALAGSAPRGETPSTDAQLANHLLSSPKERHEHRVVLHFIQQQLQRLGLPLHPVPPIRLLQLSNIQHLWTPVRASLPESVHPLDVLAQLHPTPAVAGVPCQPACQAIRDWETLDRQLYAAPLGWVNGQGDSEFIVGIRSALINGDRARLYAGAGIVAGSDPAKELAEIQLKLQALLNTLNSQ

SEQ ID NO: 94541 - protein, 458 aa, Photobacterium angustum
  misc_feature (1)..(458): tr|Q1ZRP6|Q1ZRP6_PHOAS Isochorismate synthase MenF OS=P hotobacterium angustum (strain S14 / CCUG 15956) OX=314 292 GN=menF PE=3 SV=1
MSRIGVIELSEVILTALQQAVERLIAKLEQASATTQRILVKLELSKHIDLIDWMDTQALYPKFYWQSRNCREEVVALGQIKTFTDPKAAEKVISNEQRVWGGRSFDGRTERNKRCLSSFFFLPLLELSRLDNEWHIAVNVGEDRARIVTALQQLMFDTSLISGIHSKILNRSNTPDFSGWSNMLTRALDAIEHKEFEKVVLARRTTLQLDKPVSPAQLLKASCANNSNSFHFLLALDEKHGFVGSTPERLFQRHEHAIQTEALAGTIGRGKDDVEDQQLAQWLLSDNKNRYENRLVVDDIVNRLVPCSQSMNVSQTPELVQLRKVQHLKRSIDAELNSGVFSADLLDNLQPTAAIAGLPRDPALHFIAENEPFSRGWYSGAVGYISQQHSEFCVAIRSALIIEGEVHLFAGAGIVPGSVAESEWKELDRKTSTLCSLFEQETDSALAAEFEYKNASCN

SEQ ID NO: 94542 - protein, 438 aa, Photobacterium aphoticum
  misc_feature (1)..(438): tr|A0A0J1GI60|A0A0J1GI60_9GAMM Isochorismate synthase M enF OS=Photobacterium aphoticum OX=754436 GN=menF PE=3 SV=1
MTALQKAVEFLINKIQQSAATTQRLTVKLELPANTDLIDWMESQPLFPKFYWQSRDSREEVVALGQIRTFTDPKAAEQVLDTEQRIWGGRSFDGRTHRNQRCLSSFFFLPVLEVSRVDGDWQLAVNLSDEHRQKVLDGLAQISADSAEVPAITSKILGRRYSPDFSGWSQMISNALDAISNKVFEKVVLARKTTLTLDAPVSPAQLLKASRSRNHHSFHFMMAMDAKHCFVGSTPERLFLRQERDLHTEAVAGTTGRGANAEEDANLAQWLLDDSKNRYENRLVVDDIVSRLVPRCSSMNVAQTPELIQLRKVQHLKRGIDAQLNDQVYSAELLESLQPTAAIAGLPRDEALAFISENEPFARGWYSGAVGFLSGNRSEFCVAIRSALIMDGEVHLFAGAGIVPGSTADSEWKELDRKTSTLCSLLASEEGEWERKTA

SEQ ID NO: 94543 - protein, 438 aa, Photobacterium aquae
  misc_feature (1)..(438): tr|A0A0J1GW69|A0A0J1GW69_9GAMM Isochorismate synthase M enF OS=Photobacterium aquae OX=1195763 GN=menF PE=3 SV= 1
MTALQQAVEFLIRKIQQSAPTTQRLMVKLELPANTDLIDWLDSQPLFPKFYWQSRDGREEVVALGQIKTFTDPKAAEKILAPEQRIWGGQSFDGRTARNQRCLPSFFFLPVAELARTDGDWYLAVNISPESTSKVLSALSQLSIESSEVLEIKSKILGRTYSPDFSGWSTMISNALEAISQKVFEKVVLARKTTLTLDTPVAPAQLLKASRSSNHHSFHFMMALDAKHCFVGSTPERLFLRQERALLTEAVAGTIGRGNSPAEDNRLAQWLLDDNKNRYENRLVVDDIVSRLEACCDTMNVAETPELIRLRKVQHLKRGIDAQLNSDVDSADLLESLQPTAAIAGLPRDKALDFITEHEPFARGWYSGSVGFLSQQRSEFCVAIRSALIMGDQLHLFAGAGIVPGSTADSEWKELDRKTSTLCSLFGSDETDWERKTA

SEQ ID NO: 94544 - protein, 444 aa, Photobacterium aquimaris
  misc_feature (1)..(444): tr|A0A1Y6L2U2|A0A1Y6L2U2_9GAMM Isochorismate synthase M enF OS=Photobacterium aquimaris OX=512643 GN=menF PE=3 SV=1
MTALQQAVELLVAKIKQASITTQRLRVKLELPANTDLIDWMDAQPLFPKFYWQSRDCREEVVALGQIKTFTDPLTAEKVISNDQRVWGGRSFDGHTDRNRRCLSSFFFLPLLEIIRFDGEWHLAANMSDDKPRMLAMLNKIATNPEVVADINSRILSRSYSPDFAGWSTMIDQALASIANDEFEKVVLARRTTLQLDHPVLPAQLLKASRASNSNSFHFLMALDAEHCFIGSTPERLFQRHDRVLQTEALAGTIGRGVDAQEDQQLAQWLLADTKNRYENRLVVDDIVERLVPQCESMNVAPVPELVQLRKVQHLKRSIDGQLNDTVFSANLLDSLQPTAAIAGLPRDAALNFISEHEPFARGWYSGAVGYIGQKHSEFCVAIRSAMISGDDLYLFAGAGIVPGSVADSEWKELDRKTSTLCSLFEQPDSGEDNIMDNMGYKSA

SEQ ID NO: 94545 - protein, 455 aa, Photobacterium damsela
  misc_feature (1)..(455): tr|A0A1V1V4T4|A0A1V1V4T4_PHODP Isochorismate synthase M enF OS=Photobacterium damsela subsp. piscicida OX=38294 GN=menF PE=3 SV=1
MTALQQAVEHLIAKIQQAKQTTHRVMVQLDLPIQAELIDWMENQPVFPKFYWQSRDGQEEVVALGQVKTFTDPLAAEKVIHDDQRVWGGRSFDGRTDRNRRCLSAFFFLPQLEIMRHGQTWSVAINLGDDYQKVLDGLAKLRFSSVVVDEISSRIVNRTYAPDFSGWASMIGQALDAISHKVFEKVVLARRTTLQLDTPVTPAQMMKASRANNSNSFHFMMALDAQHCFIGSTPERLFQRHEHALQTEALAGTIGRGKTAREDDELASWLMNDNKNGYENQLVVDDIVSRLNSCSHSLHVAHQPELVRLRKVQHIKRHIEAELNPQVFNTELLHNLQPTAAIAGLPREKAMEFISEHEPFSRGWYSGAVGYLSRQHSEFCVAIRSALIAGEELHLFAGAGIVPGSDPSSEWKELNRKTSTLCSLFESLPSDIEAKKASMMQLETWEQNEKWQQTA

SEQ ID NO: 94546 - protein, 465 aa, Photobacterium damselae
  misc_feature (1)..(465): tr|D0YVI1|D0YVI1_PHODD Isochorismate synthase MenF OS=P hotobacterium damselae subsp. damselae CIP 102761 OX=67 5817 GN=menF PE=3 SV=1
MVQCELSEVTLTALQQAVEHLIAKIQQAKQTTHRVMVQLDLPIQAELIDWMENQPVFPKFYWQSRDGQEEVVALGQVKTFTDPLAAEKMIHDDQRVWGGRSFDGRTDRNRRCLSAFFFLPQLEIMRHGQTWSVAINLGDDYQKVLDGLAKLRFSSVVVDEISSRIVNRTYAPDFSGWASMIGQALDAISHKVFEKVVLARRTTLQLDTPVTPAQMMKASRANNSNSFHFMMALDAQHCFIGSTPERLFQRHDHALQTEALAGTIGRGKTAREDDELASWLMNDNKNGYENQLVVDDIVSRLNSCSHSLHVAHQPELVRLRKVQHIKRHIEAELNPQVFNTELLHNLQPTAAIAGLPREKAMEFISEHEPFSRGWYSGAVGYLSRQHSEFCVAIRSALIAGEELHLFAGAGIVPGSDPSSEWKELNRKTSTLCSLFESLPSDIEAKKASIMQLETWEQNEKWQQTA

SEQ ID NO: 94547 - protein, 470 aa, Photobacterium frigidiphilum
  misc_feature (1)..(470): tr|A0A2T3JPK3|A0A2T3JPK3_9GAMM Isochorismate synthase M enF OS=Photobacterium frigidiphilum OX=264736 GN=menF P E=3 SV=1
MLNDRHILQSARDDRYGAIELSEVTLTALQTAVDLLIQKIQQSSDTTQRLMVSLDLPANTDLIDWMDSQPLFPKFYWQSRDCREEVVALGQVKTFTDPMVAEKVLADDQRIWGGRSFDGRTNRNRRCLSSFFFLPQLEVIRMDGNWQLAVNLSTDKDKMVETLNKISSTATEVAEIDSHIIGRTHSPDYSGWSSMIAQALESISNKVFEKVVLARRTTLTLDTPVAPAQLLKASRKSNNNSFHFMMALDAKHCFVGSTPERLFHRHDRDLKTEALAGTIGRGFDASEDHRLANWLMADNKNGYENRLVVDDIVNRLTPCCESMNVAQTPELIRLRKVQHLKRGIDAQLHEQVYSADLLDNLQPTAAIAGLPRDKALAFISEHEPFARGWYSGAVGFLSRQRSEFCVAIRSALMMGDEVHLFAGAGIVPGSTADSEWKELDRKTATLCSLLESDKPDKRSSDRPELERKIA

SEQ ID NO: 94548 - protein, 438 aa, Photobacterium gaetbulicola
  misc_feature (1)..(438): tr|A0A0B9GYB6|A0A0B9GYB6_9GAMM Isochorismate synthase M enF OS=Photobacterium gaetbulicola OX=1295392 GN=menF P E=3 SV=1
MTALQKAVELLLEKIRQSTPITQRLTVKLDLPANTDLIDWMESQPLFPKFYWQSRDCREEVVALGQIKTFTDPKAAEKILADEQRIWGGRSFDGRTQRNRRCMPSFFFLPVLEIFRVDGSWQMAVNLSEQSRDKVIDALAQLTLDTAVVPQITSKILGRTYSPDFSGWSQMIGNALEAISQKVFEKVVLARKTTLTLDTPVSPAQLLKASRGSNHHSFHFMMALDAKHCFVGSTPERLFLRQEQDLQTEALAGTIGRGADMAEDDRLAQWLLDDNKNRYENRLVVDDIVDRLVPRCISMNVAQTPELIRLRKVQHLKRGIDAQLNDGVENSELLDSLQPTAAIAGLPRDKALDFISENEPFARGWYSGAVGFLGARRSEFCVAIRSALIMGDELHLFAGAGIVPGSTADSEWKELDRKTSTLCSLLASDEPEWERQTA

SEQ ID NO: 94549 - protein, 443 aa, Photobacterium galatheae
  misc_feature (1)..(443): tr|A0A066RSC5|A0A066RSC5_9GAMM Isochorismate synthase M enF OS=Photobacterium galatheae OX=1654360 GN=menF PE=3 SV=1
MFHFCQAMATLIERIKRAAEGVVRLVEPLNDQPLTGTSVNPCIDWFDAQPVYPKLYWQSRDGYEEVVALGQQVTFSDPMPAYAILQDDQRIWGCRAFDGQADNCDTAKSSFFFLPHLELIRTGEYWSLAVNLHAGKETVIKVLQQLISEYLPVSPITSGIVSVRHTPTKDGWHTLVKGALNDIQAQLMDKVVLARQTTVTFDSACTAAQVLKASQQENRHSFHFLLALDARRAFLGSTPERLYRREGRRLQTEALAGTIGRGTNGAHDQRLGRWLCLDAKNLQENQYVVDDILERIRPYTDSVTVDESVSLVRLRQVQHLKRHISGVLQPDVCGAKLLHALQPTAAVAGLPRQQAMQFILNHEPFERGWYAGSLGYVSLPKAEFCVALRSAYLMDEKLQLYAGAGIVQGSDPASEWQEVDKKMSTLLSLFTDVRSDLPVSEVA

SEQ ID NO: 94550 - protein, 450 aa, Photobacterium ganghwense
  misc_feature (1)..(450): tr|A0A0J1GZP2|A0A0J1GZP2_9GAMM Isochorismate synthase M enF OS=Photobacterium ganghwense OX=320778 GN=menF PE=3 SV=1
MTALQHAVALLQQKIRHNADHAQRFTVQLDLPAETDLIDWLESQPLFPKFYWQSRDSREEVVALGQIKTFTDPKAAEKVLASQQRIWGGRSFDGRTSRNQRCLSSFFFLPVLELSRQDDTWQLAVNVTPEQEETVLATLSKIRTEATPVADIQSKILARTFTPDFNGWSAMIDQALDAITQREFEKVVLARKTTLTLDRPVAPAQLLKASRANNRHSFHFLMALDAKHCFVGSTPERLFLRQGEALHTEALAGTIGRGQSPSEDNQLARWLLEDSKNRYENSLVVDDIVSRLRDCCQSMTVAQTPELIRLRQVQHLKRGIDARLKASVDNADLLESLQPTAAIAGLPRDKALSFIQDHEPFARGWYSGSVGFLSRERTEFCVAIRSALIMGDDLHLFAGAGIVPGSTADSEWQELDRKTSTLCSLLQASDDCDATSIPSVQCLEKERKTA

SEQ ID NO: 94551 - protein, 444 aa, Photobacterium iliopiscarium
  misc_feature (1)..(444): tr|A0A0D8Q982|A0A0D8Q982_9GAMM Isochorismate synthase M enF OS=Photobacterium iliopiscarium OX=56192 GN=menF PE =3 SV=1
MTALQQAVALLITKIKQASITTQRLLVKLELPANTDLIDWMAAQTLFPKFYWQSRDCREEVVALGQVKTFTDPLIAEQVITDDQRVWGGRSFDGHTDRNRRCLSSFFFLPLLEIIRLDGEWHLAANMSDDKPRMLAMLQKIEMHPEAVTDIDSRILSRSYSPDFDRWSTMIDQALTGIANNEFEKVVLARRTTLQLDHPVLPAQLLKASRGSNSNSFHFLMALDAGHCFVGSTPERLFQRHDRALQTEALAGTIGRGADSQEDQQLAQWLLADTKNRYENRLVVDDIVGRLVPQCESMNVSPVPELVQLRKVQHLKRSIDGQLNDAVLSADLLDSLQPTAAIAGLPRDAALHFIAEHEPFARGWYSGAVGYIGQQHSEFCVAIRSAMISGDDLHLFAGAGIVPGSVADSEWKELDRKTSTLCSLFEQPCSDDGKIMDKMGYKSA

SEQ ID NO: 94552 - protein, 462 aa, Photobacterium indicum
  misc_feature (1)..(462): tr|A0A2T3L7S1|A0A2T3L7S1_9GAMM Isochorismate synthase M enF OS=Photobacterium indicum OX=81447 GN=menF PE=3 SV= 1
MLNDRHILQSARDDRYGAIELSEVTLTALQTAVDLLIQKIQQSSDTTQRLMVSLDLPANTDLIDWMDSQPLFPKFYWQSRDSREEVVALGQVKTFTDPMVAEKVLADDQRIWGGRSFDGRTNRNRRCLSSFFFLPQLEVIRMDGNWQLAVNLSTDKEKMVEALNKISSTAIEVAEINSHIIGRTHAPDYSGWSSMIAQALDSISNKVFEKVVLARRTTLTLDTPVAPAQLLKASRKSNNHSFHFMMALDAKHCFVGSTPERLFHRHDRDLKTEALAGTIGRGFDASEDHRLANWLMADNKNGYENRLVVDDIVNRLTPCCESMNVAQTPELIRLRKVQHLKRGIDAQLHEQVYSADLLDNLQPTAAIAGLPRDKALAFISEHEPFARGWYSGAVGFLSRQRSEFCVAIRSALIMGDDIHLFAGAGIVPGSTADSEWKELDRKTATLCSLLESDSPELERKTA

SEQ ID NO: 94553 - protein, 453 aa, Photobacterium jeanii
  misc_feature (1)..(453): tr|A0A178KA79|A0A178KA79_9GAMM Isochorismate synthase M enF OS=Photobacterium jeanii OX=858640 GN=menF PE=3 SV= 1
MTALQTAVEELILKIQHASPSTHRVTVKMDLPANTDLIDWMDAQPVFPKFYWQSRDSREEVVALGQIKTFTDPMAAEKILADDQRVWGGRSFDGRSDRNRRCLSSFFFLPQCEVIRMDQAWHLAANIPAETQSRESLVKALHKFTYATTSISRIRAKVLSRSYAPDFSGWSNMIGQALDAISQKVFEKVVLARRTTLKLDNAISPAQLLKASRNSNTNSFHFMMALDAKHCFIGSTPERLFLRHHHDLKTEALAGTIGRGVSEAEDGRLAQWLLDDSKNRYENRLVVDDIVGRLNPCCQQLNVAQVPELVRLRKVQHLKRSIDGQLHEQVYNADLLDNLQPTAAIAGLPRDKALDFISEHEPFARGWYSGAVGFLSRQRSEFCVAIRSALIMGEEIHLFAGAGIVPGSTADSEWKELDRKTSTLYSLIDANLPDVCNSEHNIEQTEKWERQSA

SEQ ID NO: 94554 - protein, 457 aa, Photobacterium kishitanii
  misc_feature (1)..(457): tr|A0A2T3QWD7|A0A2T3QWD7_9GAMM Isochorismate synthase M enF OS=Photobacterium kishitanii OX=318456 GN=menF PE=3 SV=1
MSRIGDIELSEVILTALQQAVELLVVKIKQASVTTQRLLVKLELPANTDLIDWMDAQPLFPKFYWQSRDCREEVVALGQIQTFTDPLTAEKVISDEQRVWGGRSFDGRTDRNRRCLSSFFFLPLLEIIRFDGEWHLAANMSDDKSLMLTMLKKIATKPEVVTDIDSRILSRSYSPDFAGWSTMIEQALTGIANDEFEKVVLARRTTLQLDHPVLPAQLLKASRASNSNSFHFLMALDAEHCFVGSTPERLFQRHDRVLQTEALAGTIGRGVDSHEDQQLAQWLLADTKNRYENRLVVDDIVERLVPQCESMNVAPAPELVQLRKVQHLKRSIDGQLNNDVFSANLLDSLQPTAAIAGLPRDAALNFIADHEPFARGWYSGAVGYIGQKHSEFCVAIRSAMISGDDLHLFAGAGIVPGSVADSEWKELDRKTSTLCSLFEQPSFDNDKVMNNRGYKSA

SEQ ID NO: 94555 - protein, 445 aa, Photobacterium leiognathi
  misc_feature (1)..(445): tr|X0NLU7|X0NLU7_PHOLE Isochorismate synthase MenF OS=P hotobacterium leiognathi lrivu.4.1 OX=1248232 GN=menF P E=3 SV=1
MTALQQAVELLIAKLEQASATTQRLLVKLDLSKNIDLIDWMDTQDLYPKFYWQSRNCREEVVALGQIKTFTDPKAAEKVISDDQRIWGGRSFDGRTERNRRCLSSFFFLPLLELSRIDNDWHLAVNVGEDRDRMLTSLKQLKFDTSLISGIQSTILNRSYTPDFSGWSNMITRALDAIENKAFEKVVLARRTQLQLDKPVSPAQLLKASCANNSNSFHFLMALDDKHGFIGSTPERLFQRHEYTLQTEALAGTIGRGHDEAEDHQLAQWLLSDNKNRYENRLVVDDIVNRLVPCSQSMNVAQIPELVQLRKVQHLKRSIDAQLNDGIFSADLLDNLQPTAAIAGLPRDPALHFIAENEPFSRGWYSGAVGYIGQHHSEFCVAIRSALIIEGDVHLFAGAGIVPGSIAESEWKELDRKTSTLCSLFGQDQSSSETPEMEFKRASCN

SEQ ID NO: 94556 - protein, 450 aa, Photobacterium lipolyticum
  misc_feature (1)..(450): tr|A0A2T3MVE9|A0A2T3MVE9_9GAMM Isochorismate synthase M enF OS=Photobacterium lipolyticum OX=266810 GN=menF PE= 3 SV=1
MSLYGAIELSEVTVIALQTAVEVLIDKVQQAPDTTQRLMVPLDLPANTDLIDWMESQPLFPKFYWQSRDSREEVVALGQIKTFTDPMVAEKVLSDDQRIWGGRSFDGRTSRNRRCLSSFFFLPLLEVIRMDGSWQLAVNLSADKEKLLLALAQVTATAKEVAGIRSTIIGRTYTPDFSGWSTMISQALDAISQKVFEKVVLARRTTLKLDTPVAPAQLLKASRASNSKSFHFMMALDEKHSFIGSTPERLFLRHERELKTEALAGTVGRGLDAREDNQLAQWLMADTKNRYENRLVVDDIVSRLVPCCASMEVAQTPELVQLRKVQHLKRGIEAQLNDHVYSADLLDNLQPTAAIAGLPREQALSFITEHEPFARGWYSGAVGFLSRQRSEFCVAIRSALIMGEEVHVFAGAGIVPGSTADSEWMELDRKKATLCSLLESDEPELERVSA

SEQ ID NO: 94557 - protein, 438 aa, Photobacterium lutimaris
  misc_feature (1)..(438): tr|A0A2T3IXI1|A0A2T3IXI1_9GAMM Isochorismate synthase M enF OS=Photobacterium lutimaris OX=388278 GN=menF PE=3 SV=1
MTALQKAVELLLEKIRQSTPTTQRITVKLDLPANTDLIDWMESQPLFPKFYWQSRDCREEVVALGQIKTFTDPKAAEKILADDQRIWGGRSFDGRTQRNRRCMPSFFFLPLLEIFRLDGGWNIAVNLSAESRGKVVEALAQLTLATVEVPQITSKILGRTYSPDFAGWSQMIGNALDAISQKVFEKVVLARKTTLTLDTPVSPAQLLKASRDNNHNSFHFMMALDAKHCFVGSTPERLFLRQEQDLLTEALAGTIGRGVDMAEDNRLAQWLLDDNKNRYENRLVVDDIVDRLVPRCISMNVAQTPELIRLRKVQHLKRGIDAQLNDGVENSELLDSLQPTAAIAGLPRDKALDFISEHEPFARGWYSGAVGFLGARRSEFCVAIRSALIMGDELHLFAGAGIVPGSTADSEWKELDRKTSTLCSLLASDEPDWERQTA

SEQ ID NO: 94558 - protein, 437 aa, Photobacterium marinum
  misc_feature (1)..(437): tr|L8J8E1|L8J8E1_9GAMM Isochorismate synthase MenF OS=P hotobacterium marinum OX=1056511 GN=menF PE=3 SV=1
MTALQQAVESLIEQIQTATKTTQRLVVKLDLPANTDLIDWIESQPLFPKFYWQSRDSREEVVALGQLKTFTDPMAAEKVLSDDQRIWGGRSFDGRSSRNRRCLSSFFFLPVLEIIRFDGCWQLAVNMSDDKEKILQTLAQVKPEASEISAIKSKILGRTYAPDFSGWSTMISNALEAISQKVFEKVVLARRTTLKLDTPVSPAQLLKASRGSNMNSFHFMMAMDEKHCFVGSTPERLFLRHNRDLLTEALAGTIGRSHDPSEDNRLAQWLLDDNKNRYENRLVVDDIVSRLNTCCESMNVAQTPELVRLRKVQHLKRSIDAQLNDQVYSADLLDSLQPTAAIAGLPRDKALDFISEHEPFARGWYSGAVGFLSRQRSEFCVAIRSALIMGEELHLFAGAGIVPGSTADSEWKELDRKTSTLCSLLSSEEPELERRSA

SEQ ID NO: 94559 - protein, 444 aa, Photobacterium phosphoreum
  misc_feature (1)..(444): tr|A0A2T3JUY0|A0A2T3JUY0_PHOPO Isochorismate synthase M enF OS=Photobacterium phosphoreum OX=659 GN=menF PE=3 S V=1
MTALQQAVELLVAKIKQATITTQRLVVKLELSANTDLIDWMDAQPLFPKFYWQSRDCREEVVALGQIKTFTDPLIAEKVIADDQRVWGGRSFDGHTDRNRRCLSSFFFLPLLEIIRLDGEWHLAANMSDDKPRMLTMLQKIATNPEVVTDIDSRILSRSYSPDFAGWSTMIEQALTGIANDEFEKVVLARRTTLQLDHPVLPAQLLKASRASNSNSFHFLMALDAEHCFVGSTPERLFQRHDRALQTEALAGTIGRGADNQEDQQLAEWLLADTKNGYENRLVVDDIVGRLVPQCESMNVSPVPELVRLRKVQHLKRSIDGQLNDAVFSANLLDSLQPTAAIAGLPRDAALNFIAEHEPFARGWYSGAVGYIGQKHSEFCVAIRSAMISGDDLHLFAGAGIVPGSVADSEWKELDRKTSTLCSLFEQPYFDDGTVMDNMGYKSA

SEQ ID NO: 94560 - protein, 444 aa, Photobacterium piscicola
  misc_feature (1)..(444): tr|A0A1T5I2A2|A0A1T5I2A2_9GAMM Isochorismate synthase M enF OS=Photobacterium piscicola OX=1378299 GN=menF PE=3 SV=1
MTALQQAVALLIANIKQASATTQRLLVKLELPANTDLIDWMDAQSLFPKFYWQSRDCREEVVALGQIKTFTDPLIAEQVINDDQRVWGGRSFDGHTDRNRRCLSSFFFLPLLEIIRFDGEWHLAANMSDDKPRMLAMLEKIVISPDIVTDIDSRILSRSYSPDFAGWSTMIDQALTGIANDEFEKVVLARRTTLQLDHPVLPAQLLKASRASNSNSFHFLMALDAEHCFVGSTPERLFQRHERALQTEALAGTIGRGADTQEDQQLAQWLLADTKNRYENRLVVDDIVERLVPQCESMNVAPVPELVQLRKVQHLKRSIDGQLNDAVFSANLLDSLQPTAAIAGLPRDAALNFIADHEPFARGWYSGAVGYIGQKHSEFCVAIRSAMISGDDLHLFAGAGIVPGSVADSEWKELDRKTSTLCSLFEQPCSDDVNIMDKMGYKSA

SEQ ID NO: 94561 - protein, 466 aa, Photobacterium profundum
  misc_feature (1)..(466): tr|Q1Z7Z0|Q1Z7Z0_9GAMM Isochorismate synthase MenF OS=P hotobacterium profundum 3TCK OX=314280 GN=menF PE=3 SV= 1
MLNDRHILQSARDDRYGAIELSEVTLTALQTAVDLLIQKIQQSSDTTQRLMVSLDLPANTDLIDWMDSQPLFPKFYWQSRDCREEVVALGQVKTFTDPMVAEKVLADEQRIWGGRSFDGRTNRNRRCLSSFFFLPQLEVIRMDGNWQLAVNLSTDKEKMLEALNKISSTATEVAEINSHIIGRTHAPDYSGWSSMIAQALDSISQKVFEKVVLARRTTLTLDAPIAPAQLLKASRKSNNHSFHFMMALDAKHCFVGSTPERLFHRHDRELKTEALAGTIGRGFDASEDLRLANWLMTDNKNGYENRLVVDDIVSRLVPRCESMNVAQTPELIRLRKVQHLKRGIDAQLHEQVYSADLLDSLQPTAAIAGLPRDKALAFISEHEPFARGWYSGAVGFLSRQRSEFCVAIRSALMMGDEVHLFAGAGIVPGSTADSEWKELDRKTATLCSLLESGQPDNESKLERKTA

SEQ ID NO: 94562 - protein, 438 aa, Photobacterium proteolyticum
  misc_feature (1)..(438): tr|A0A1Q9GND9|A0A1Q9GND9_9GAMM Isochorismate synthase M enF OS=Photobacterium proteolyticum OX=1903952 GN=menF PE=3 SV=1
MTALQTAVESLIKKIQQATQTTQRLTVALDLPANTDLIDWMESQPLFPKFYWQSRDSREEVVALGQIKTFSDPMAAEKVLSDEQRIWGGRSFDGRTSRNRRCLSSFFFLPQLEVIRLDGNWQLAVNLSADDKECTLQALSQVTPDTTEVPEIKSKILGRSYAPDFAGWSAMIGNALDAISQNIFEKVVLARRTTLQLDLPVSPAQLLKASRSRNISSFHFMMAMDAKHCFVGSTPERLFLRQERDLQTEALAGTIGRGQDLSEDDQLAQWLMDDNKNRYENRLVVDDIVSRLVPRCATMNVADTPELVRLRKVQHLKRSIGAQLNEQVYSADLLDSLQPTAAIAGLPRDKALDFITEHEPFARGWYSGAVGFLSRQRSEFCVAIRSALIMGEELHLFAGAGIVPGSTADSEWQELDRKTSTLCSLLGSDEPELERKSA

SEQ ID NO: 94563 - protein, 438 aa, Photobacterium rosenbergii
  misc_feature (1)..(438): tr|A0A2T3NBW7|A0A2T3NBW7_9GAMM Isochorismate synthase M enF OS=Photobacterium rosenbergii OX=294936 GN=menF PE= 3 SV=1
MTALQKAVELLLEKIRQSTPTTQRITVKLDLPANTDLIDWMESQPLFPKFYWQSRDCREEVVALGQIKTFTDPKAAEKILSDGQRIWGGRSFDGRTQRNRRCMPSFFFLPVLEIFRLDGGWNVAVNLSEESRDKVTDALAQLTLDTAEVPQISSKILGRTYSPDFTGWSQMIGNALEAISQKVFEKVVLARKTTLTLDTPVSPAQLLKASRDSNHNSFHFMMALDAKHCFVGSTPERLFLRQEQDLQTEALAGTIGRGADIAEDDRLAQWLLDDNKNRYENRLVVDDIVDRLVPRCISMNVAQTPELIRLRKVQHLKRGIDAQLNDGVENSELLDSLQPTAAIAGLPRDKALDFISENEPFARGWYSGAVGFLGARRSEFCVAIRSALIMGDELHLFAGAGIVPGSTADSEWKELDRKTSTLCSLLASDEPDWERRTA

SEQ ID NO: 94564 - protein, 439 aa, Photobacterium sanctipauli
  misc_feature (1)..(439): tr|A0A2T3NXJ7|A0A2T3NXJ7_9GAMM Isochorismate synthase M enF OS=Photobacterium sanctipauli OX=1342794 GN=menF PE =3 SV=1
MTALQKAVELLIKKIQQQSNDSTQRFTVKLELPANTDLIEWMEAQPIFPKFYWQSRDSREEVVALGQIKTFTDPKAAEKVLADEQRIWGGRSFDGRSSRNQRCLSSFFFLPVVEIIRLDGSWQLAANYSAENADKIVKSLSQLNASSVELAEIKSKIVGRSYSPDFAGWSKMIGSALDAISQKVFEKVVLARKTTLKLDTPVSPAQLLKASRGSNLNSFHFMMALDSKHCFVGSTPERLFLRQERDLNTEALAGTIGRGINTAEDNRLAQWLMDDNKNRYENRLVVDDIVSRLVPRCESMTVAETPELIRLRKVQHLKRGIDAQLNESVDSADLLDSLQPTAAIAGLPREAALDFIMENEPFARGWYSGAVGFLSNRRSEFCVAIRSALIMGDDLHLFAGAGIVPGSTADSEWKELDRKTSTLCSLLGSDEPELERKSA

SEQ ID NO: 94565 - protein, 440 aa, Photobacterium sanguinicancri
  misc_feature (1)..(440): tr|A0A264TB78|A0A264TB78_9GAMM Isochorismate synthase M enF OS=Photobacterium sanguinicancri OX=875932 GN=menF PE=3 SV=1
MTALQTAVEQLIQKIQHASKSTQRLMVKMNLPTNTDLIDWMDAQPLFPKFYWQSRDSREEVVALGQIKTFTDPLVAEKILADDQRVWGGRSFDGRTDRNRRCLSSFFFLPQCEVIRMDNSWHLAVNLSEGSTVREQLIAALNKLTNSTPPISQIRSNVIGRTHAPDFTGWSNMIGDALDAISQKVFEKVVLARRTTLKLDTPVSPAQLLKASRSSNTNSFHFMMALDAKHCFIGSTPERLFMRHHLDIKTEALAGTIGRGANEAEDGRLAQWLLDDSKNRYENRLVVDDIVSRLNTCCHDLDVAKTPELVRLRKVQHLKRRIGGQLKDQIYNADLLDNLQPTAAIAGLPRDKALDFISTHEPFARGWYSGAVGFLSRQRSEFCVAIRSALIMGEEIHLFAGAGIVPGSTADSEWKELDRKTSTLCSLLNSNETEMERQSA

SEQ ID NO: 94566 - protein, 458 aa, Photobacterium sp.
  misc_feature (1)..(458): tr|Q2C608|Q2C608_9GAMM Isochorismate synthase MenF OS=P hotobacterium sp. SKA34 OX=121723 GN=menF PE=3 SV=1
MSRIGVIELSEVILTALQQAVKRLIAKLEQASATTQRILVKLDLPKHIDLIDWMDTQTLYPKLYWQSRNCREEVVALGQIKTFTDPKAAEKVISNEQRIWGGRSFDGRTERNKRCLSSFFFLPLLELSRLDNEWHIAVNVGEDRARIVTALQQLMFDTSLISGIHSKILNRSNTPDFTGWSNMLIRALDAIENKEFEKVVLARRTTLQLDKPVSPAQLLKASCANNSNSFHFLMALDEKHGFMGSTPERLFQRHEHAIQTEALAGTIGRGKDDVEDQQLAQWLLSDNKNRYENRLVVDDIVNRLVPCSQSMNVSQTPELVQLRKVQHLKRSIDAELNSGVFSADLLDNLQPTAAIAGLPRDPALHFIAENEPFARGWYSGAMGYISQHHSEFCVAIRSALIIEGEVHLFAGAGIVPGSVAESEWKELDRKTSTLCSLFEQETDRSLAAEMGYKSASCN

SEQ ID NO: 94567 - protein, 440 aa, Photobacterium swingsii
  misc_feature (1)..(440): tr|A0A0J8XXU8|A0A0J8XXU8_9GAMM Isochorismate synthase M enF OS=Photobacterium swingsii OX=680026 GN=menF PE=3 S V=1
MTALQTAVEQLIQKIQHASKSTQRLMVKMNLPANTDLIDWMDAQPLFPKFYWQSRDSREEVVALGQIKTFTDPLAAEKVLADEQRVWGGRSFDGRTDRNRRCLSSFFFLPQCEVIRMDDGWHLAVNLSEASSIREQLITALNKLTATTSPISQIRSNVIGRTHAPDFSGWSNMIGQALDAISQKVFEKVVLARRTTLKLDAPVSPAQLLKASRSSNTNSFHFMMALDAKHCFIGSTPERLFMRHHHDIKTEALAGTIGRGANEAEDGRLAQWLLDDSKNRYENRLVVDDIVSRLNTCCHDLDVAKIPELVRLRKVQHLKRRIGGQLNDQVYNADLLDNLQPTAAIAGLPRDKALDFISTHEPFARGWYSGAVGFLSRQRSEFCVAIRSALIMGEEIHLFAGAGIVPGSTADSEWKELDRKTSTLCSLLNSNETEMERQSA

SEQ ID NO: 94568 - protein, 444 aa, Photobacterium toruni
  misc_feature (1)..(444): tr|A0A1T4NGS3|A0A1T4NGS3_9GAMM Isochorismate synthase M enF OS=Photobacterium toruni OX=1935446 GN=menF PE=3 SV =1
MTALQQAVALLIANIKQASVTTQRLVVKLELPANTDLIDWMDAQSLFPKFYWQSRDCREEVVALGQIKTFTDPLIAEQVITDDQRVWGGRSFDGHTDRNRRCLSSFFFLPLLEIIHFDGEWHLAANMCDDKSRMLAMLQKIATDPEVVTDIDSRILSRSYSPDFVGWSTMIEQALAGIANDEFEKVVLARRTTLQLDHPVLPAQLLKASRASNSNSFHFLMALDAEHCFVGSTPERLFQRHDRALQTEALAGTIGRGADSQEDQQLAQWLLADTKNRYENRLVVDDIVGRLVPQCESMNVSPVPELVKLRKVQHLKRSIDGQLNDAVFSANLLDSLQPTAAIAGLPRDAALNFIAEHEPFARGWYSGAVGYIGKKHSEFCVAIRSAMISGDDLHLFAGAGIVPGSVADSEWKELDRKTSTLCSLFEQPCSDDGKSIDKMEYKSA

SEQ ID NO: 94569 - protein, 393 aa, Photorhabdus asymbiotica
  misc_feature (1)..(393): tr|C7BNH2|C7BNH2_PHOAA Isochorismate synthase OS=Photor habdus asymbiotica subsp. asymbiotica (strain ATCC 4394 9 / 3105-77) OX=553480 GN=phbC PE=4 SV=1
MLDLYRDALLTGFNNLNNKDFLFLSSSKSLLAQGQYAILSKPLDDAVNPDSLIQQEIGQLFQQAKNDGIENPILVGAIPFDKQQNAALFVPKKCHWFQRQQFPAPISNSIYTEKRRCQWPDKVHFSHMVNTAIDAMHNHALDKVVLSRLLDIETHQPLDSIQLLRHLNQQNSWCYNFHVPLENGALIGASPELLVRKQGNTIFSQPLAGSAKRSENPEDDHKLRQALIQSIKDNYEHRLVTDMIRNVLESRCQKLHISKMPSTISTPVLWHLATDIEGVLKAPQENALSVACLLHPTPALCGTPYQTAKNLIEKLEPFKRNLFGGIVGWCDAKGDGEWVVTIRCGEVIGSRIRLFAGAGIVPDSNPESEWQETEVKFSTMLRAFEFSQEVCPA

SEQ ID NO: 94570 - protein, 393 aa, Photorhabdus australis
  misc_feature (1)..(393): tr|A0A1C0U9V0|A0A1C0U9V0_9GAMM Isochorismate synthase E ntC OS=Photorhabdus australis OX=286156 GN=entC PE=4 SV =1
MLDLYRDALLTGFNDLNNEDFLFLSSSKSLLAQGQYAIVSKPLDDAVNPDSLIQQEIHQLFQRAKNDGIENPVLVGAIPFDKRQNAALFVPKKCHWFQRQQFPMLISNAIYTEKRRCQWPDKAHFNHMVNTAIDAMRNHALDKVVLSRLLDIETHQPLDSIQLLRHLNQQNSWCYNFHVPLENGALIGASPELLVRKQGNTIFSQPLAGSAKRSENQEDDHKLRQALIQSVKDNYEHRLVTDMIRNVLESRCQKLHISKMPSTISTPVLWHLATDIEGMLKAPQENALSVACLLHPTPALCGTPYQTAKNLIEQLEPFKRNLFGGIVGWCDAKGDGEWVVTIRCGEVNGSRIRLFAGAGIVSDSNPESEWQETEVKFSTMLRAFEFSQEACPA

SEQ ID NO: 94571 - protein, 439 aa, Photorhabdus bodei
  misc_feature (1)..(439): tr|A0A329XCJ0|A0A329XCJ0_9GAMM Isochorismate synthase M enF OS=Photorhabdus bodei OX=2029681 GN=menF PE=3 SV=1
MNQIANVVADVCKTLNNEQVSEVGIQQISFPLPAGCSTYWLEWLAAQSHYPQFYWHHREGHEEVAACGQIHLFSDIALAENFLQRNRQFPQIRIWGLNAWDRIQPARITQSEAGETGYLFLPRIELRRCRDESWLYLNIAGPQDVRNAREFLQQLVPHQEFSALQAVVVNAENMPERARWSDLIEQALDTITHRKMEKVVMARKTQLELSESLAAAQFMAASRQINHCCYHFMLAFNQHEAFLASSPERLYHRKQTQLYTEALAGTVANSDDAQQAEKLGQWLLGDKKNQHENLLVVDDICQRLQDAVVSVDVAPPDVIRLRKVQHLRRRIQGKLKSASDSDCLHRLQPTAAVAGLPREAARDFIRDSELFSRDWYAGSAGYLSCEQSEFAVSLRCAQINNNLLSLYAGAGIVMGSDPQQEWIEIENKAAGLRTLLKGE

SEQ ID NO: 94572 - protein, 393 aa, Photorhabdus khanii
  misc_feature (1)..(393): tr|W3V1R8|W3V1R8_9GAMM Isochorismate synthase OS=Photor habdus khanii NC19 OX=1004151 GN=PTE_04186 PE=4 SV=1
MPDLYRNTLLTGFNDLNNKDFLFLSSSKSLLAQGQYAIVSKPLDDAANPDSLIQQEIRQLFQQAKRDGIENPVLVGAIPFDKQQNAALFVPEQCNWFQRKQFPTLISNSTYTEKRRTQWPDKAHFSQMVNTAVDAMRNHRLDKIVLSRLLDIETHQPLDSIQLLRHLNQQNSWSYNFHVPLQNGALIGASPELLVRKQGNTIFSQPLAGSAKRSENQQEDYKLRQALIQSVKDNYEHRLVTDMMRNVLESRCQKLHISEMPSTISTPVLWHLATDIEGELKAPQENALSIACLLHPTPALCGTPYQTAKNLIEELEPFKRNLFGGIVGWCDEKGNGEWVVTIRCGEVNGSRVRLFAGAGIVPDSKPESEWQETEVKFSTMMRAFEFSQEACPA

SEQ ID NO: 94573 - protein, 439 aa, Photorhabdus laumondii
  misc_feature (1)..(439): tr|A0A329VGW1|A0A329VGW1_9GAMM Isochorismate synthase M enF OS=Photorhabdus laumondii subsp. clarkei OX=2029685 GN=menF PE=3 SV=1
MNQIANVVADVCKTLNNKQVSEVGIQQISFPLPAGCSTYWLEWLAAQSHYPQFYWHHREGHEEVAACGQIHLFSDIALAENFLQRNCQFPRIRIWGLNAWDRIQPARITQSDAGEAGYLFLPRIELRRYRDESWLYLNIAGRQDMKNAQEFLQQLVPHQEFSALQAVVVNAENVPERARWCDLIEQALDTITHRKMEKVVMARKTQLELSESLAAAQFMAASRQINHCCYHFMLAFNQHEAFLASSPERLYLRKQTLLYTEALAGTVDNSDDAQQAEKLGQWLLGDKKNQHENLLVVDDICQRLQGAVVSVDVAPPEVIRLRKVQHLRRRIQGKLKSASDSDCLHRLQPTAAVAGLPREAARDFIRDSELFSRDWYAGSAGYLSCEQSEFAVSLRCAQINNNLLSLYAGAGIVMGSDPQQEWIEIENKAAGLRTLLKGE

SEQ ID NO: 94574 - protein, 439 aa, Photorhabdus luminescens
  misc_feature (1)..(439): tr|A0A5C4RKU3|A0A5C4RKU3_PHOLU Isochorismate synthase M enF OS=Photorhabdus luminescens subsp. sonorensis OX=11 73677 GN=menF PE=3 SV=1
MNKIANVVADVCKTLNNEQVSEVGIQQISFPLPAGCSTYWLEWLAAQSHYPQFYWHHREGHEEVAACGQIHLFSDIALAENFLHRNRQFPQIRIWGLNAWDRIQPARITQSEAGEAGYLFLPRIELRRCHDESWLYLNIAGQQDVRNAQEFLQQLVPYQEFSALQAVVVNAENVPERARWCDLIEQALEAITHRKMEKVVMARKTQLILSESLTAAQFMAASRQINHRCYHFMLAFNRHEAFLASSPEQLYYRKQTQLYTEALAGTVANSDDAQQAEKLGQWLLGDKKNQHENLLVVDDICQRLQGAVVSVDVAPPDVIRLRKVQHLRRRIQGKLKHARDSDCLHRLQPTAAVAGLPREAARGFIRDSEPFNRDWYAGSAGYLSCEQSEFAVSLRCAEINNNLLSLYAGAGIVMGSDPQQEWIEIENKAAGLRTLLKGE

SEQ ID NO: 94575 - protein, 440 aa, Photorhabdus namnaonensis
  misc_feature (1)..(440): tr|A0A1B8YK58|A0A1B8YK58_9GAMM Isochorismate synthase M enF OS=Photorhabdus namnaonensis OX=1851568 GN=menF PE= 3 SV=1
MVNQIANVVANVCKTLNNKQVSEVGIQQISFPLPAGCNTYWLEWLAAQSHYPQFYWHHREGHEEVVACGQIHLFSDIVSAENFLHRNSQFPQIRIWGLNAWDRIRPARITQSKAGEAGYLFLPRIELRRYRDESWLYLNIAGRQDMRNAQEFLQQLVPHREFSALQAVVVNAENMPERAQWCDLIEQALETITHRKMEKVVMARKTQLVLSESLAAAQFMAASRQINHRCYHFMLAFNQHEAFLASSPERLYFRKQTQLYTEALAGTVANSDDVQQAKKLGQWLLEDKKNQHENLLVVDDICQRLQGAVVSVDVAPPDVIRLRKVQHLRRRIQGKLKSARDSDCLHRLQPTAAVAGLPREAARDFIRNSEPFSRDWYAGSAGYLSCEQSEFAVSLRCAQINNNLFSLYAGAGIVIGSDPQQEWIEIENKAAGLRTLLKGE

SEQ ID NO: 94576 - protein, 439 aa, Photorhabdus sp.
  misc_feature (1)..(439): tr|A0A329X1Z4|A0A329X1Z4_9GAMM Isochorismate synthase M enF OS=Photorhabdus sp. HUG-39 OX=2029680 GN=menF PE=3 SV=1
MNQIANVVADVCKTLNNKQVSEVGIQQISFPLPADCSTYWLEWLAAQSHYPQFYWHHREGHEEVAACGQIHLFSDIALAENFLQRNRQFPQMWIWGLNAWDRIQPARITQSEAGETSYLFLPRIELRRCRDESWLYLNIAGPQDVRNAQEFLQQLVPHQEFSALQAVVVNAEDMPERARWSDLIEQALDSITHRKMEKVVMARKTQLELSESLAAAQFMAASRQINHCCYHFMLAFNQHEAFLASSPERLYHRKQTQLYTEALAGTVANSDDAQQAEKLGQWLLGDKKNQHENLLVVDDICQRLQGAVVSVDVAPPDVIRLRKVQHLRRRIQGKLKSASDSDCLHRLQPTAAVAGLPREAARDFIRDSELFSRDWYAGSAGYLSCEQSEFAVSLRCAQINNNLLSLYAGAGIVMGSDPQQEWIEIENKAAGLRTLLKGE

SEQ ID NO: 94577 - protein, 393 aa, Photorhabdus temperata
  misc_feature (1)..(393): tr|A0A081S278|A0A081S278_PHOTE Isochorismate synthase O S=Photorhabdus temperata subsp. temperata Meg1 OX=13937 35 GN=MEG1DRAFT_00421 PE=4 SV=1
MPDLYRDTLLTGFNDLNNKDFLFLSSSKSLLAQGQYAIVSKPLDDAANPDSLIQQEIRQLFQQAKSDGIENPVLVGAIPFDKQQNAALFVPEQCNWFQRKQFPSLISNSTHTEKRRTQWPDKAHFSQMVNTAVDAMRNHRLDKIVLSRLLDIETHQPLDSIQLLRHLNQQNSWSYNFHVPLENGALIGASPELLVRKQGNTIFSQPLAGSAKRSENQQEDYKLRQALIQSVKDNYEHRLVTDMMRNVLESRCQKLHISEMPSTISTPVLWHLATDIEGELKAPQENALSIACLLHPTPALCGTPYQTAKNLIEELEPFKRNLFGGIVGWCDEKGNGEWVVTIRCGEVNGSRVRLFAGAGIVPDSKPESEWQETEVKFSTMMRAFEFSQEACPA

SEQ ID NO: 94578 - protein, 435 aa, Phycicoccus bigeumensis
  misc_feature (1)..(435): tr|A0A502CPV1|A0A502CPV1_9MICO Isochorismate synthase O S=Phycicoccus bigeumensis OX=433644 GN=EAH86_14470 PE=4 SV=1
MTSLPTPQHAPRPHGSPVVARTVALHDPGLLLSLLPDRTDPTELFSWVRRGEGLVGWGRALEFTAHGPDRFERAEAWWRDVVDGAVVRNEVSLPGTGPVAFGSISYAAGSPAGATLVVPEVVVGARDGQWWVTTIGTGDELPTPVVPRQSQPREPEGVAFADGALAPAAWAGAVERAVERITGGTLDKVVLARDLRVSAEAPIDPRWLLTRLAERYDTTWVFAVDGLVGATPEMLVRLEKGLVTSRVLAGTIRRTGDDEHDLALAASLARSSKDLEEHEYAVRSVADALRPHCSSMNVPEAPFVLHLSNVMHLATDVAGVLADRATSLTLAASLHPSAAVCGTPSAVADDLITELEGMDRGRYAGPVGWMDSTGDGEWGIALRCGAFEPDDASAMRLFAGCGIVAGSDPDSEVAESDAKLVPMRDALTTDSLTAD

SEQ ID NO: 94579 - protein, 436 aa, Phycicoccus sp.
  misc_feature (1)..(436): tr|A0A444BA05|A0A444BA05_9MICO Isochorismate synthase O S=Phycicoccus sp. CMS6Z-2 OX=2502783 GN=EPD83_19350 PE= 4 SV=1
MTTLPADRSAHPAAAPLVARTVPLDPALAADLLALLPPGDPTSSASWVRRGEGVVGWGRAASASASGPGRFAELERWWSALAGSAVVRDEVALPGTGPVAFGSFAYSEASPAGATLVVPQVVVGRRGGRAWITTVAVGPDVAGLPGPVDVRPRPEADPPRDVAFADGALSPGDWAGAVAEAVRRITAGELDKVVLARDLEVSTGAPVDVRWLLRRLAERYDTTWVFAVDGLVGATPELLVRREKGLVTSRVLAGTIRPTGDDAHDLALAASLARSSKDLEEHEYAVRSVADALAPHCSSMNVPEAPFVLHLSNVMHLATDVTGVLDDATSSLALAAALHPSAAVCGTPTAAADAVIAELEQLDRGRYAGPVGWVDAAGDGEWGIALRSGAVDPQDPSRMRIFAGCGIVAGSDPDAELAESSAKLVPMRDALTAAPR

SEQ ID NO: 94580 - protein, 443 aa, Phycisphaera sp.
  misc_feature (1)..(443): tr|A0A3R7QXY4|A0A3R7QXY4_9BACT Isochorismate synthase O S=Phycisphaera sp. TMED24 OX=1986832 GN=CBB84_005525 PE =4 SV=1
  misc_feature (28)..(28): Xaa can be any naturally occurring amino acid
MVHMFRSRIASGPVHTHTASATDLPSAXAILQRLALGSGDGWRRLVVDLSTPLDPIQEICGRALGRRVAFKSRSGRTIAGVDAALRGDWIDDITLSALRSLMPDAAVVAWSRFDPAVESSPGWMPFGRRAWILPRLQLEVDEGRHRLVGYLLPGERPEAIEPARASLLVPRRSPVTARMFRQDEDWDFRDLVQEAIGAIRSGELEKVVLARQVSYALSEPIDAAYVLHQLASGNQYSFLVESGEHAFLGSSPERLSRRIGQRLQTEMLAGTVRARSADEAMQLLESSKDRHEHDVVVRSVTERLASIAKARKNEDQVAVVPAAGGLWHLRRQLELTLNDAVDDASVLGLLHPTPAVCGRPTNMARSHLASQEGFDRGLYAGPIGLFDGLGHDVAVAIRSLRLSPEMATLFAGAGIVRDSQPEMEFVETEAKLAVARAALPGTG

SEQ ID NO: 94581 - protein, 443 aa, Phycisphaeraceae bacterium
  misc_feature (1)..(443): tr|A0A520Q663|A0A520Q663_9BACT Isochorismate synthase O S=Phycisphaeraceae bacterium OX=2026777 GN=EVA77_06980 PE=4 SV=1
MIHMSRLRIASGPVHTHTASATDLPSALAILHRLALGSGDGWRRLVVDLPAPLDPIHEICGRALGRRVAFKSRSGRTIAGVDAALRGDWIDDITLNALRGLMPDAAVVAWSRFDPAVESSPGWMPFGRRGWILPRLQLEAHDGCQRLVGYLLPGERPEAIEPARASLLVPRRSPVTARMYRQDEDCDFRNLVQQAIGAIKSGDLEKVVLARRVSYALSEPIDAAYVLHQLASGSHYSFLVESGEHAFLGASPERLSRRVGQRLQTEMLAGTVRARSADEAMQLLASSKDRHEHDVVVRSVTERLTPIAKAKKSEGQVAVVPAAGSLWHLRRKLELTLNDAIDDASVLGLLHPTPAVCGRPTNMARSHLSTQEGFDRGLYAGPIGLFDGSGHDVAVAIRSLRLSPQMATLFAGAGIVRDSQPEMEFVETEAKLAVARAALPGTG

SEQ ID NO: 94582 - protein, 432 aa, Phytobacter diazotrophicus
  misc_feature (1)..(432): tr|A0A4V2WCP2|A0A4V2WCP2_9GAMM Isochorismate synthase M enF OS=Phytobacter diazotrophicus OX=395631 GN=menF PE= 3 SV=1
MLSISVALEQLREKLSGIDANSPGFYVFDVAFALNDAFDPLTFLASQPCFPQFYWQQRSGEDEAAALGQVLRFPSLAEARHFLNDNPEHDLRVWGLNAFDPQQGELFLPRLEWRREGGRASLRIIVLNGNAQQNDVAQARSFIDALVRAKSLPDVQMELVSQHHFPQQSGWEALVTQATQAITRGEMDKVVLARATDYHFSQPVNAAAVMAASRRLNHHCFHFFIAFDPHNAFLGSSPERLWRRRGTSLRTEALAGTVANDTDDTRATELGDWLMNDDKNQRENMLVVEDICQRLQHATSTLDVLPPQIVRLRKVQHLRRCIWTEMHHNDDAQCLTLLQPTAAVAGLPRLAARAFITQHEPFEREWYAGSAGYLSLKQSEFCVALRCAKISGTTVRIYAGAGIVAGSDPTMEWQEIENKAAGLRSLLIMKHV

SEQ ID NO: 94583 - protein, 432 aa, Phytobacter ursingii
  misc_feature (1)..(432): tr|A0A508U7K2|A0A508U7K2_9GAMM Isochorismate synthase M enF OS=Phytobacter ursingii OX=1972431 GN=menF PE=3 SV= 1
MHSISVALEQLREKLAGIDANSPGFYVFDVAFALNDAFDPLTFLASQSCFPQFYWQQRSGEDEAAALGQVLRFTSLAEARHFLDDNPEYDLRIWGLNAFVSQQGELFLPRLEWRREGGRAFLRLIVINDAAQRGDAAQARAFIDALVRAKSLPDVQMELVSQQHCPEQSGWEALVTQATQAIARGEMDKVVLARATDYRFSQPVNAAALMAASRRLNHHCFHYFIAFDPHNAFLGSSPERLWRRRGTSLRTEALAGTVANDTDDTRAAELGNWLMNDDKNQRENMLVVEDICQRLQRAAATLDVLPPQIVRLRKVQHLRRCIWTEMRHKDDAECLTLLQPTAAVAGLPRQAARAFITQYEPFAREWYAGSAGYLSLKQSEFCVALRCAKISGATVRLYAGAGIVAGSDPTMEWQEIENKAAGLRSLLIMKHA

SEQ ID NO: 94584 - protein, 407 aa, Pigmentiphaga aceris
  misc_feature (1)..(407): tr|A0A5C0B2R6|A0A5C0B2R6_9BURK Isochorismate synthase O S=Pigmentiphaga aceris OX=1940612 GN=FXN63_25600 PE=4 S V=1
MNAPVPSVAAAGPAADSWFANYRADDYLFVSPTASVLGRDAALTLAPGPEPLWQRAADLLAEAQNSGIAAPVLIGAVPFDASRPARLVVPRQCQLDGPLDRRSMKPAAKTSIATPITMTSVPPEEGYEAAVTDALERFAARELDKVVLARTLDITLTSPPDRPMLMRSLLQRNPHGFTFAIPLDDSQTDAGNPPVFLGASPELLLRRQGRRVILNPLAGSAARQADPVADRAAADALLASAKDRHEHAIVIDSIAAALRPYCRDLRLPDGPTLTSTDALWHLSTWIEAELDDPAVSSLELALALHPTPAVCGHPTGAAFAAIHDLEPFDRGFFAGLVGWCDAQGDGEWAVSLRCAESDGASLRLYAGAGVVPGSEPARELAETGVKFRTMLAALGLMTSQQPASGRD

SEQ ID NO: 94585 - protein, 462 aa, Piscibacillus halophilus
  misc_feature (1)..(462): tr|A0A1H9JIG4|A0A1H9JIG4_9BACI Isochorismate synthase M enF OS=Piscibacillus halophilus OX=571933 GN=menF PE=3 SV=1
MLQTKPFTINEQLNKAKEYMDTVNQTQLMVSLVEKVNFINPVQFFSYYQNQDLLRLFWRDSEDSFYLVGIGNYKTIQSHQNRFHSVQQQWEGLLTDFFIPNDSVKGTGPLMLGGFSFNDSVMDDKWKTFQSGLMVVPEAMLTVIQGECYMTYNVTVNENTDVDALTTKLKQWTENINDQYESNVPQQLQTTNSLDYRNWEQLIRDAVNRIKNGTLGKVVLARELEAEFNQSIDLNNVLKKLVEQQKDSFIYIFDYGDDAFISATPERLVKVDENELLSTCLAGTIKRGDSLKEDDLLAQSLLNDEKNRSEHQYVVSMIKEAIEPLTHSIDLPSQPEILQLRTLQHLYTPVTAILKDSYTIFDLIEKLHPTPALGGEPRQAAVMFIKENEPFERGWYAGPVGWIDAHGNGEIIVAIRSALINQNKATLFAGCGIVEESDPYEEYEETKLKFTPMLEALGGISR

SEQ ID NO: 94586 - protein, 472 aa, Planctomycetaceae bacterium
  misc_feature (1)..(472): tr|A0A424K2E7|A0A424K2E7_9PLAN Isochorismate synthase O S=Planctomycetaceae bacterium TMED241 OX=1986836 GN=CBE 01_000650 PE=4 SV=1
MPADSRFYDLLSAAESGWRDRSGDDGLLSLALPLDGIDPMWALTGLAGEQTFRMLWDCAPGLSLAAAGRCQQLELAGSRRFELAQRFSDLTLGRLVDGRPDCPPQARPRVLLSFSFFDQTTGHQQDPMTVPSVQAVLPCWQLSRQGRRGWLRINGVVTDAADARHLAERLWLKATDLEESRPVEPVDKAEPLWSRHAALPWQDQYSGALHRALELVNGGDLHKLVLAVRQSIDLTQPFDPLPLLSRLRRQQAGSCRFLWQREAGNVFFGASPERLLSLRGGCLRSDALAGTAGHGDDGQQLLQSDKDRREHELVVETITDQLRQAGLTPWRRRQPQLARHGRLTHLHTPITAETGGLSALALADQLHPTPAVAGLPRREAMAWLRTLEPFERGGYAAPFGWIDSAGDAELRVAIRCGHARGQRLDLTAGAGLVRGSIAERELQEVGLKLAVLADQLDWSSDAQSSPRSRSIT

SEQ ID NO: 94587 - protein, 470 aa, Planctomycetales bacterium
  misc_feature (1)..(470): tr|A0A1W9TET5|A0A1W9TET5_9BACT Isochorismate synthase M enF OS=Planctomycetales bacterium 4572_13 OX=1971638 GN =menF PE=3 SV=1
MKTDDYIFSRESVREWVTDKIAATFTPVDRRSGQLLSFSCMFDSLCIMDWLIAQNNPVKMYWSSRDAHLEIAAVGLADTVDPKRASCLDGALAGIEKNLVNGSVDIRYYGGICFDMTDSETAAWEGLGPYYFFVPKFELRQENDQSVFLFNVLAMPQDDVASITERFLESLDSLSFDSNTSPESLTDKSRLPSVLRRSDRPDQDRWQKQTREMIDLIQADRIKKIVQTRITSLELSETPDPLHLLNCVKSRSVNTYDFCFQIDTEQSFIGCSPERLYKKEGNSIWSEALAGTNVRVADHELNGQLQKELLESQKEIEEHEYVFENIKSELEKICSKVEVVDKREVLPLKHIQHLRSRFSGTLKKGIDNGDILRDLHPTAAVNGYPKKAALALICQYENFSRGWYAGPVGWIGRGRSEFAVAIRSAHITSQRIRLFAGAGIVSASYPGREWEETEMKMAPFLDLFEPSLKS

SEQ ID NO: 94588 - protein, 457 aa, Planctomycetes bacterium
  misc_feature (1)..(457): tr|A0A3L7T0E8|A0A3L7T0E8_9BACT Isochorismate synthase O S=Planctomycetes bacterium OX=2026780 GN=DWI09_12310 PE =4 SV=1
MSTGSFHRPATADDSLSVVQRSAIALAARIEATQLPGVGRFVRIESEVEPTDLLQWLRSAPAGDRRYFRDRSAKFEIASVGIAAACTFGEHVDWQQDVVAASSERASAWFVSLPFDAVRMRDGAWKRFCQHSCVLPEFELRRHGEQHALAVHLTASTDRAALAARMRQIARNAGSGATACVVEPALVRQPDGTAEADWSRAVNAALERIRTGAMRKIVLARTRRYIASGALDPVAVLTRLASREARGFRFLVEAGEGHAFLGVTPERLVSRSGRVARSEAVAGTRPRGVDGVADRLLGESLLASAKDRREHDLVVERVRDALAGCSTSLRTESEPRLLRLAYVQHLALRVQGDLRVGVSDRDLVNALHPTPAVAGAPVAEAIVALRDFEPFDRGLYSGPIGVVSRDGAEIAVAIRSARIEGNALTAFAGAGIVEGSDPAEEWRETGHKLLAFERLAT

SEQ ID NO: 94589 - protein, 498 aa, Planktothrix agardhii
  misc_feature (1)..(498): tr|A0A073CB16|A0A073CB16_PLAAG EntC OS=Planktothrix aga rdhii NIVA-CYA 126/8 OX=388467 GN=entC PE=4 SV=1
MFIFYMPVFPSATPLLQDRQELHRFLLEFQNYGLQDYQTKILSIAHEIQWIDPLAILQQFYHPNLIHFYFEKPQFEESFVAVDTAIKFITAGKNRFIEAQKFIQSCLDKTVIIGSKNSHLPKPYFCCSFTFFDQYFNPNLSLNCGQNLAVEPENVYFPPATIFLPKWQVIRKKNRCILIVNIVLKKNSKIENILSDVWYKSQQINGLETTSIPSVTSKTPSLLLTQQVETDPKPYLQFKQSVHSALDLINSKSLKKLVLSQPIDVVSKTPFNLIHSLNNLRLLYPDCYIFSTGNGKGQQFIGASPERLISLKNNQLITDALAGSAPRGKTPIEDINLGQELLNSEKNLREHQVVIDFIIERLLSLGLTPDLTDLPCLRQLTNIQHLWTPIKCQVSTNIHLLEILSQLHPTPAVAGTPRDIAQQYIHNYESFDRSLYAAPIGWIDHQGNGEFVVGIRSALLDGNRARLYAGAGIVAGSEPEKEVAEIQLKLQALLRALV

SEQ ID NO: 94590 - protein, 493 aa, Planktothrix rubescens
  misc_feature (1)..(493): tr|A0A1J1L7K1|A0A1J1L7K1_PLARU Isochorismate synthase O S=Planktothrix rubescens OX=59512 GN=PLAN50387 PE=4 SV= 1
MPVFPSATPLLQDRQELHRFLLEFQNYGLQDYQTKILSIAHEIQWIDPLAILQQFYHPNLIHFYFEKPQFEESFVAVDTAIKFITAGKNRFIEAQKFIQSCLDKTVIIGSKNSHLPKPYFCCSFTFFDQYFNPNLSLNCGQNLAVEPENVYFPPATIFLPKWQVIRKKNRCILIVNIVLKKNSKIENILSDVWYKSQQINGLETTSIPSVTSKTPSLLLTQQVETDPKPYLQFKQSVHSALDLINSKSLKKLVLSQPIDVVSKTPFNLIHSLNNLRLLYPDCYIFSTGNGKGQQFIGASPERLISLKNNQLITDALAGSAPRGKTPIEDINLGQELLNSEKNLREHQVVIDFIIERLLSLGLTPDLTDLPCLRQLTNIQHLWTPIKCQVSTNIHLLEILSQLHPTPAVAGTPRDIAQQYIHNYESFDRSLYAAPIGWIDHQGNGEFVVGIRSALLDGNRARLYAGAGIVAGSEPEKEVAEIQLKLQALLRALV

SEQ ID NO: 94591 - protein, 493 aa, Planktothrix sp.
  misc_feature (1)..(493): tr|A0A1T4ZBI6|A0A1T4ZBI6_9CYAN Isochorismate synthase O S=Planktothrix sp. PCC 11201 OX=1729650 GN=PL11201_1700 18 PE=4 SV=1
MPVFPSATPLLQDRQELHRFLLEFQNYGLQDYQTKILSIAHEIEWIDPLEILQQFYHPNLIHFYFEKPQFEESFVAVDTALKFTTAGKNRFFEAQKFIQSCLDKTVIIGSKNSHLPKPYFCCSFTFFDQYFNPNLSLNSRQNPSGEPENVYFPPATIFLPKWQVIRKKNRCILIVNIVLKKNSKIENILSDVWYKSQQINALKTTLIPSVTSKTPSLLLTQQVETDPKPYLQFKQSVHSALDLIKSKSLKKLVLSQPIDVVSKTPFNLIHSLNNLRLLYPDCYIFSTGNGKGQQFIGASPERLISLKNNQLITDALAGSAPRGKTPIEDINLGQELLNSEKNLREHQVVVDFIIERLLSLGLTPDLTDLPCLRQLTNIQHLWTPIKCQVSTNIHLLEILSQLHPTPAVAGTPRDIAQQHIHHYESFDRSLYAAPLGWIDHQGNGEFVVGIRSALLDGNRARLYAGAGIVAGSEPEKEVAEIQLKLQALLRALV

SEQ ID NO: 94592 - protein, 463 aa, Planococcus salinus
  misc_feature (1)..(463): tr|A0A3M8P4E3|A0A3M8P4E3_9BACL Isochorismate synthase O S=Planococcus salinus OX=1848460 GN=EEX84_15200 PE=4 SV =1
MNSQPYSSTSNSMDTRYSAYRFYTETIEISPLSALAFFEAGGKGHNGKRMFWQNREKTFTFVGLGHAHVLSASDYYGRFEDIKQQWQSLCQQIVNEEPEVQPILFGGFSFDPLNDYESEWIHFPDAYFVVPSFQLTLKEDRAYVSIHLISTKQDTFGEFEALRKERDQLIHAAQVSELASYEKPLVIERQEIKKQQYMESIKKVTEVIKAEQAEKVVIARAMKLTFEQHLPSSSALYQVSKEQPESFLFGLEAEDQFFFGATPERLVKVEDQQALSTCLAGSIPRGKTVEQDTELGNELLNDPKNRSEHQYVVNMISQVFAEHCASMYIPKQPKLMKIRDIQHLYTPVEGKLTDGSTLFDLVKDLHPTPALGGEPKEEALSLIRQYETMNRGYYAAPVGWIDANGNGEFAVAIRSALLNEQDAFLFAGGGIVADSTPESEYAETWVKFRPMLRALGGQLSDES

SEQ ID NO: 94593 - protein, 463 aa, Planococcus sp.
  misc_feature (1)..(463): tr|A0A5C5T5R7|A0A5C5T5R7_9BACL Isochorismate synthase O S=Planococcus sp. CPCC 101016 OX=2599617 GN=FQV26_12065 PE=4 SV=1
MNSESSSSTQQFAAGPYEGYRFYTETIEVARMSALAFFEAGGNDHKGKRMYWQNREKTFTLVGIGHAHVLSTNKTNGRFEKIKEDWTSLCRQIVNEEHSVQPVLFGGFSFDPLNGKSSEWTKFPQAYFAVPTFQLILKGEQAFVSIHLITEKQESFAEFDAMRKERDKLIHAAQVSEVDKYDKPRATGRTELRKEEYLASIQQVTDIIKAKEVEKVVIARALRLEFEHKLSPASALYQVSNEQPESFLFGLEAEEQFFFGATPERLVKVEDQKALSTCLAGSTPRGKTVEKDMELGEALLKDPKNRAEHQYVVKMISEVFEANCSRTVVPKLPKLMKIRDIQHLYTPVEGKLNPDATLFDLVEVLHPTPALGGEPKLEALHMIREHEAMNRGYYAAPIGWIDAKGDGEFAVAIRSALLDGEKAYLYAGGGIVADSTPESEYDETWVKFRPMLRALGGQLSDES

SEQ ID NO: 94594 - protein, 463 aa, Planomicrobium glaciei
  misc_feature (1)..(463): tr|A0A518XPK5|A0A518XPK5_9BACL Isochorismate synthase O S=Planomicrobium glaciei OX=459472 GN=FK545_14285 PE=4 SV=1
MNPQQYSSIEQYADTRYSAYRFYTETIEVSRMSALAFFEAGEKQYKGKRMFWQNREKTFTLVGLGHAHVLASSVQQGRFEEIKHKWESLCKQIVNEEPDVEPILFGGFSFDPLNELESEWTHFPEAYFAVPSFQLVIKDDQAYVSINLITAEKETFNQFELMRKERDRLIHAAQVLELPKYQKPLVMGRTEIKKEQYLDSIDKVTAIIKAEQAEKVVIARSLKLNFEEPLSASSALYQVSEEQPESFLFGMEAETQFFFGATPERLVKVKESQALSTCLAGSTPRGKTMEKDMELGEALLNDKKNRSEHQYVVDMISEVFNGHTSRLTVPNVPKLMKIRDIQHLHTPVEGELNSGSTLFDLVRDLHPTPALGGEPKQEALDIIREYETMNRGYYAAPVGWIDAKGDGEFAVAIRSALLNEKEAYLYAGGGIVEDSTPESEYDETWVKFRPMLRALGGLLSDES

SEQ ID NO: 94595 - protein, 463 aa, Planomicrobium sp.
  misc_feature (1)..(463): tr|A0A5C5UM73|A0A5C5UM73_9BACL Isochorismate synthase O S=Planomicrobium sp. CPCC 101110 OX=2599619 GN=FQV30_11 760 PE=4 SV=1
MNSQPYSSTEKYEDTRFLAYRFYTETIEVTGMSALAFFEAGKASFKGQRMFWQNREKTFTLVGVGHAHTLSTVNHHGRFEDIQKDWQSLCKQIVNEERSVQPVLFGGFSFDPLNKQQSEWVRFPQAYFAVPSFQLVIKNDRAYVSIHLITKEEETFNEFEALRKERDKMIHTAQVSELAAYNKPIVSGRQELKKEQYMESIKKVTAIIKAKQAEKVVIARTLKLKYKEALSPASALYQVSKEQPESFLFGLEAEDQFFFGATPERLVKVENRQALSTCLAGSTSRGKTVEQDTELGEELLRDRKNRSEHQYVVAMISKVFAEHCRETLVPKMPALMKTRDIQHLHTPVKGELKAGSTLFDLVRDLHPTPALGGEPKQAALSLIRQYETMNRGYYAAPIGWVDAGGNGEFAVAIRSALLNEKEAYLYAGGGIVEDSTPESEYLETWIKFRPMLRALGGQLRDES

SEQ ID NO: 94596 - protein, 404 aa, Plantibacter sp.
  misc_feature (1)..(404): tr|A0A3G8VF34|A0A3G8VF34_9MICO Isochorismate synthase O S=Plantibacter sp. PA-3-X8 OX=2480625 GN=EAO79_00595 PE =4 SV=1
MVAQTVAIDDPRQLLPFADQTSPLLWVRKGYGLVGLGEALRLEFSGPDRFTRAAAAWRDVCAAAVVTDEVRRPGTGLVAFGTFAFDDESSATSVLIVPRTIIGRYPDASFITRVSLGDGAEDVDPATTAYGPEYRIQLTPGVQSREGYLDSAERAIARIQAGGLSKVVLARDLAGHLPAEADRRRVLHDLALGYPDCWTYAVDGFIGSSPETLVRVDRGAVSARVLAGTISRGPDAESDHDQAVALMTSAKDQGEHQFAVQSVLTALQAHSPQLRRSEVPFTLKLPNLWHLATDIDGRLSDGSSSLDLMDGLHPTAAVAGTPTRDAVALIRELEPFDRGRYAGPVGWVDASGDGEWAVALRCAQIAPDGDITAYAGCGIVADSDAATELVETKMKFRPIVEAFG

SEQ ID NO: 94597 - protein, 453 aa, Plesiomonas shigelloides
  misc_feature (1)..(453): tr|A0A2P1VTT1|A0A2P1VTT1_PLESH Isochorismate synthase M enF OS=Plesiomonas shigelloides OX=703 GN=menF PE=3 SV= 1
MPRLRQLFCGPADNAVPDVTHSDSSSAALPDSPGIRQFTFSMLRRDAGKLLDWLSAQPLFPKFYWLHRDGSEEVAALGQVRVFNRPDAVSEFLQAQSEPLRVWGGTAFDGLQARSHGCLSGWFFLPRFELRQTTKGAWLTINLHSHTSLREDGLQAWQQLCQLVASSALNLPDVTVEQARHAPDKAGWFALIRKSLAAIEAREFDKVVLARKTTLTLDKPVAPAELLAASRRVNHRCFHFMLALDDSHGFVGSSPERLFRRSGQTLYTEALAGTVSRTGDDIQDHQLAQWLLSDKKNQHENLLVVEDICSRLSGHVDNLDVLPAEVLALRKVQHLRRRITAQLRQADDAQCLTWLHPTAAVAGLPREPARRFIHEHEPFERGWYAGSVGHISRERAEFTVAIRSALIQQNQVHLFAGAGIVPGSDPEAEWQEIERKAAGLRTLLEPDYVNKCL

SEQ ID NO: 94598 - protein, 479 aa, Pleurocapsa sp.
  misc_feature (1)..(479): tr|K9SYB0|K9SYB0_9CYAN Isochorismate synthase family pr otein OS=Pleurocapsa sp. PCC 7327 OX=118163 GN=Ple7327_ 0138 PE=4 SV=1
MSAAVPVVPFRANHLSTNERELQQFLLGLQEKSPRKYKTQIVSFSLQLDPIDPLSVLAAIARSDRTHFYWENAAREEAILGFEVAKSFTINSGDRFAKSQKFIEECLDRTVRIGDLCLPGSGPYLFCSFTFFESQQNDPSPFPRATVILPSYQIVRKKQDCTLVINLAIDRDAELQDLLRAIQNKIKAFIQSANDLAPNRSSDRNQVIKQEVTFQSLENFRSSVAHALKSIQEKQFSKIVLAHSLDVTSDAPFQIVESLNNLRQIYPDCYIFSLANGRGHHFIGASPERLLSVRDGELITDALAGSAPRGKNVTEDDCFAKKLLRSEKEKREHKAVTEFITERLSQLGLKPQRSPLKLLKLSNIQHLWTPIYAKLPSNIHPLEIVAKLHPTPAVAGVPTEIACEQIRQYESFNRGLYAAPIGWINYQGNGEFIVGIRSASIEKNRARLYAGAGIVSGSDPDKEMAEIQLKFQALLKALL

SEQ ID NO: 94599 - protein, 430 aa, Pluralibacter gergoviae
  misc_feature (1)..(430): tr|A0A251ZHR5|A0A251ZHR5_PLUGE Isochorismate synthase M enF OS=Pluralibacter gergoviae OX=61647 GN=menF PE=3 SV =1
MYSLSAALDNLRVLLNDELPDAPGLRVFDLAVTLKDACDPLSWLCVQPLYPQFYWQHRDDNEEVAAIGAACRFTALAEARDFLQRQARPDLRIWGLNAFAQEQGQLFLPRLEWRRDAGRSALRLTLYSASSLRDDARSALTLLDALRPERPLPALALDLTRERHLPERAGWQRLIEQATGAIADGALQKVVLARASDLSFTAPPGAGPLMAASRRRNLNCYHFMMAFGPQQAFFGSSPERLWRREESLLWTEALAGTAASHPDPRRAQGLADWLMSDEKNQRENLLVVEDICQRLGDEVSELKVAPPEVIRLRKVQHLRRKVQGRLRRPDDLLCLRQLQPTAAVAGLPRRAAREFIARHEPFEREWYAGSAGYLSLRGSEFCVALRSARLSDNVLRLYAGAGIIAGSDPQQEWQEIENKAAGLRTLLFEQ

SEQ ID NO: 94600 - protein, 320 aa, Polaribacter sp.
  misc_feature (1)..(320): tr|A0A395K0W1|A0A395K0W1_9FLAO Isochorismate synthase O S=Polaribacter sp. WD7 OX=2269061 GN=DUT90_08945 PE=4 S V=1
MKEETLFFTSDFTESGFVFSPFDAEENTVLFPVDKADFLQEKIERLDNFEFFNRYTDDESEKEAHINLVDKTILKIKNSSLQKIVISRKELILLKDFDVLLLFKKLLKQYKAAFVYVWYHPKIGLWFGATPETLLHISNQRFKTMSLAGTQLLQENTAVAWGAKELEEQQLVTDFIVNQLKPITTSLKVNQKETVQAGSLLHLKTKVEGEVKSNSDLKQLIRALHPTPAVCGLPRKEAFVFITENEPYKRDFYTGFLGELNLESNLDKSKLSKLYVNLRCMRIDGKMASLYVGGGITKDSNAFKEWTETVSKSKTMKTVL

SEQ ID NO: 94601 - protein, 469 aa, Polyangium fumosum
  misc_feature (1)..(469): tr|A0A4U1JC83|A0A4U1JC83_9DELT Isochorismate synthase O S=Polyangium fumosum OX=889272 GN=E8A74_20895 PE=4 SV=1
MSSGLGADLLARLSRATRRGAGSAGELVAVVAPAPVVPAARLVDACTSAAPIVLFQAPPREGEEPIGVVGFGEVARVEGSGPERLAQITSAARRIFATLREERDADAGGAPGPRFVGGLSFRTEARHVPPWTAFADASFSLARWMYVTRPGEAWLWLLVRDGDLAPERSAIEAELASIEAVFVIAAQPAQDALPRGAGEGARIEGTSREAFCSLVREALDAIRAGEIDKVVPVAATRVRPVRPLDARVALSRLAEAYAETTRFAVQRGEHVFLGASPERLISRRGRVVRTDGLAGTVRRGVDDASLVQALLANPKERREHALVVEAIAAVLGPRCDTLDVPDAPSIRSLPNVHHLWTPIRGALRDDTHVLALVEALHPTPAVSGTPREQATAWIATHEPDARGWYTGAVGWFDAAGDGDFSVAIRAGLVSPDEAWLYAGAGIVEGSDPPAEYAETRAKQAPMLAALGIQ

SEQ ID NO: 94602 - protein, 467 aa, Polyangium sp.
  misc_feature (1)..(467): tr|A0A4V5PHG0|A0A4V5PHG0_9DELT Isochorismate synthase O S=Polyangium sp. SDU3-1 OX=2567896 GN=E8A73_27110 PE=4 SV=1
MSSSFVARALEAATRQRAPAEIIAITVPAMPVAPDRLLVARGADDAPILFWDASAREREGGGALAGWGEAARVEGSGPERLRQVIAEAERLFAQVFEVRHPEAEGAPSPRLFGGLSFRPEPRREAPWAAFGDASFVLPRLRYAVRGGRGSLQLCARVEDLLREDRRAVIVADFERAQEAITAAGRGVPMHREGGAGDARIEGMTSAAFCELVEAALAHIRSRALEKVVAVAPSHVTSSRAIDIGAALVRMGEDYGDCTRFAIQRGDAVFVGASPERLVARSGRVVETDGLAGTARRGANEEAIKDALFTSAKERREHAIVVEAIARVLESATTALDVPAEPVIRTLRNVHHLWTPIRATLRAPLHVLSLVESLHPTPAVCGTPREDAVAFIAQNEPSGRGWYTGAVGWLDGAGDGDFAVAIRAGLVGAREAWLYAGAGIVEGSDPRSEFAETRAKQAPMLTALGIGA

SEQ ID NO: 94603 - protein, 462 aa, Pontibacillus chungwhensis
  misc_feature (1)..(462): tr|A0A0A2VDI1|A0A0A2VDI1_9BACI Isochorismate synthase M enF OS=Pontibacillus chungwhensis BH030062 OX=1385513 G N=menF PE=3 SV=1
MIETTSFYHEKLYKALSNRKHIDTPQLISVTTKLDSVDSLGFFQAGKVYQGERVYWTSADTMFTLVGVGSAYTFEAEQDRFFSTRQMWNDVLAEAIIDNPYRIPGTGPVALGGFSFDPLKEENGTWKDFPNSKVLIPMYLLTEWRDETYLTINMMIHPDDNEDELFGHVTEEYQSLLAGTFIHDDDVTVTNQEEVRPEEFKEIVAKATDHIKSNRLGKVVLAREMIVSFSDDRKASSVIRQLKEEQTQSYIFAFESGDSCFVGATPERLVKVEDNELLSTCLAGTVPRGNTPKEDVALGEALIHDEKNLQEHDFVVQMIKKAVTGCCENVHVPNSPVLYPLRNLQHLYTPVSGTLKEGVSLLEVVEKLHPTPALGGYPREDSLQFIRDYEPFHRGWYASPVGWFDSYQNGEFAVAIRSALLKKDQAILFSGCGVVEDSDPDEEYKETAVKFLPMIHALGGRE

SEQ ID NO: 94604 - protein, 463 aa, Pontibacillus halophilus
  misc_feature (1)..(463): tr|A0A0A5G8R3|A0A0A5G8R3_9BACI Isochorismate synthase M enF OS=Pontibacillus halophilus JSM 076056 = DSM 19796 OX=1385510 GN=menF PE=3 SV=1
MIKVKSKYFLNKLYEALNTIQSERTPQLISVSAPIEHLNVFGFYQAGAHYAGSRSFWMNADRSLTLVGVGSAYTIEAKSDRFKAIETEWSKILEDADIHNQSDVPGTGPVLLGGFSFDPNRTGSEKWSNFPDSKFSVPMFLLTEYQEQSYLTVNVLVQKEDHLEQLYAHLTQEMNHLLEHDLYKEVKPTVTGTQEINPSQWKETVHKATMQIREGFMDKVVLARELKAQFSHPCSVATLLESVTEQQPQSFVFAIESGGDCFFGATPERLVKVNQGEVLSTCLAGTAPRGETLAEDEQLGQDLLHDQKNLQEHEFVVQMIRKAIESCSTDVEIPAGPVLYPLRNVQHLYTPVKGNLKQGSSLLSVVERLHPTPALGGFPRAEAMSFIRAEEDMDRGWYAAPVGWLDGKSNGEFGVAIRSALLSENEAYLYAGCGIVADSDPEAEYEETAIKFSPMLHVLGGSQ

SEQ ID NO: 94605 - protein, 460 aa, Pontibacillus litoralis
  misc_feature (1)..(460): tr|A0A0A5G0V9|A0A0A5G0V9_9BACI Isochorismate synthase M enF OS=Pontibacillus litoralis JSM 072002 OX=1385512 GN =menF PE=3 SV=1
MVVIHTTSKLYNTLHDVMENIKPVMQKQLVSITTKVDNANSFAFYQAGTTNQGTRFYWASADRTLTLVGIGETVAFESDDNGFDAVHHSFGQLLENAAIYNDYEASGTGPIAFGGFAFDPLKEGSVTWGDFPNSSMVIPTYLLTIVHQESYLTINALVEPGESLEPYIAQSVQFMESTFQREQMPYLIQQEEVAPEEWKQIVKDATEDIKRGVIDKVVLAREMIATFSENIPISSLLNVLSEQQHQSYIFAFERGMSCFVGSTPERLVKVEQRSLLSTCLAGTISRGQTQEEDEQLGSYLLHDEKNLQEHDFVVQMIKQAVELCCDDVVVPDGPILYPLRNLQHLYTPVKGKLQQGYTILDVVQRLHPTPALGGYPVEASIEFIRDKEPFHRGWYAAPIGWFDPKDNGEFAVAIRSALLYQNQATLFAGCGVVEDSQPEVEYEETAIKFSPMLQALGGLQ

SEQ ID NO: 94606 - protein, 462 aa, Pontibacillus marinus
  misc_feature (1)..(462): tr|A0A0A5FZM4|A0A0A5FZM4_9BACI Isochorismate synthase M enF OS=Pontibacillus marinus BH030004 = DSM 16465 OX=13 85511 GN=menF PE=3 SV=1
MIKTTTHYNERLYKALSQIHHIETPQLISVTEQMATANPFRFYQAGKAYQGERVYWTSTDQVFTLVGIGSAYTLEAEEDRFNTIQQAWKALMEEAVIDNPYESSGTGPVALGGFSFDPHDHSRTAWEDFPDSKVSIPMFLLTKTESANYITVNIMVHPEDDIEDIYQFVTQAYQEFLEGGTSIDEMPSIIGKEEIQPLEWKDIVKQAAHDIQSGYMSKVVLARELEVNFDRDVNIVSVLDALQREQQQSYVFAVESGDSCFIGATPERLVKVDNRELHSACLAGTIARGDTVEEDQALGEELLHDNKNLQEHDFVVQMIREAVESCCDQVQIPSEPVIYPLRNLQHLYTPVKAKLRVGYTILEVVEKLHPTPALNGYPRQEALSYIREHEPFDRGWYASPVGWFDYKDNGEFAVAIRSGLVKKNKTVLYSGCGIVEDSMPEAEYEETAIKFLPMLNALGGRT

SEQ ID NO: 94607 - protein, 462 aa, Pontibacillus yanchengensis
  misc_feature (1)..(462): tr|A0A0A2T903|A0A0A2T903_9BACI Isochorismate synthase M enF OS=Pontibacillus yanchengensis Y32 OX=1385514 GN=me nF PE=3 SV=1
MIQTTSTLYEKLYRSIATIDSSQSSQLVSVTTEIEEVKPLAFYQAGNTFKGERFYWSSADRSFTLVGIGEACKIESNEEGFQLTQKQWGELLNHAEIDNVTNASGTGPVAFGGFAFDPYKQASATWSDFPNSSTVVPRFLLTKSGTKYFITINALLSPEDSTDLYYQELVNQCTTLLEKEFEQSSEPQLIQQEEVAPEEWKRIVRETTEEIKAGKLGKVVLAREMIATFSSDIYIASLLNTLQEQQHQSYVFAYERGDSCFVGATPERLVKLEERELLSTCLAGTIARGETVEEDRYLGNQLLQDNKNLQEHEFVVNMIKAAVETCCHDVDVPDHPVLYPLRNLQHLYTPVRGKLYNGYTILDIVKQLHPTPALGGYPIKESIEFIREKEPFHRGWYASPIGWFDARDNGEFAVAIRSALITHNQAVLFSGCGIVEDSHPEAEYEETAIKFLPMLHALGGSQ

SEQ ID NO: 94608 - protein, 389 aa, Pontibacter sp.
  misc_feature (1)..(389): tr|A0A501WAN6|A0A501WAN6_9BACT Isochorismate synthase O S=Pontibacter sp. HB172049 OX=2589816 GN=FJM65_03000 PE =4 SV=1
MGDTTQNHTLEQIFGAAIAGQKAVAVWRLPLSQKVQACMQLGQQYTTGQPQLEASPFGFFFCPFQVSAQEQNIFIKGDLYFDGEKLAPAADAPEKQLQEFYTLLQAPPSINGWHTSANLENHTFQTEQGFMRAVEKAVEAIQAEQMEKVVLSRNSLQALPENFSPVAAFQAMADAYPRAFVSLVSVPGVGTWMGASPEILVSINEQQEFHTVALAGTQTAVENVADAIWRQKEIEEQAMVERYILSCFKKLRLREYTEVGPKTIKAGNLMHLRTDFKVNLKVVHFPTLGTDMLELLHPTSAVCGLPKEPALQFILAHEGYNRSYYSGYLGPVNSTSGSHLYVNLRCMQLQQHEANLYAGAGITEGSNPQREWQETQHKMQTMGKILSEY

SEQ ID NO: 94609 - protein, 435 aa, Pontimonas salivibrio
  misc_feature (1)..(435): tr|A0A2L2BSP8|A0A2L2BSP8_9MICO Isochorismate synthase O S=Pontimonas salivibrio OX=1159327 GN=C3B54_111774 PE=4 SV=1
MANATSEPPLAAAESDNPLLFQRLGKGVAGSGVALRAEFSGTNRFHDATTWWSEVVEHATVTNPLGRPGTGLLAMGAFSFSTLSHHRSVLIVPRHVWGTDEHGSWQTTIEVIEHETGGAAVEEDGLATSHAAATNALDNTANKSSRATEPESAAEPAARHNEWHAGQVSEARFLDLVSQAKQAISQGGLHKVVVARDLVRSFEQEPDWRIVLQGLTEAYPDTFVFSLDGFFGASPETLVSLRGEHVSLRVLAGSTARGSHPEEDRAQSEALSTSTKDLDEHQFAVRSVVESLAAANITAVADDNPFSLKLPNLWHLATDVVAKVPEGIGGLRVLQALHPTAAVAGSPTTDALAFLEEHENLDRGRYAGPVGWIDERGDGDWAIALRCAQYDPEAYTLTAYAGAGVVAESDPERELLETGLKFRPITEGAHHNSRP

SEQ ID NO: 94610 - protein, 381 aa, Porphyromonas crevioricanis
  misc_feature (1)..(381): tr|T1CS32|T1CS32_9PORP Isochorismate synthase OS=Porphy romonas crevioricanis JCM 15906 OX=1305617 GN=PORCRE_16 33 PE=4 SV=1
MRASPYCSIAELFSLPCSDSSAFVLIQMPGSVAQYWHCPTYSAVQKLQDLTSEEGFVFAPFCATAQTPIYFLPPLDVREFPLSTSISFPSHSTVSSKESVFGKRDYKPNDTYQSAFTSFHSAVRSGQFSKLVLSREEVLSLQDTITPIDLFADLLNLQQPGAKYLIFIPEIGFWLGATPEVLLCSSPQETYTMALAGTKALGREFEIGQDCEDFFGAKNNSEHEVVVDHIRTVLCSEGIKLGKTEKRALKSYNVQHLCTRFDFDNSDHLVIARLVDKLHPTPAVCGIPTEKAKDFIRKYEGYERRYYAGYLGYWQYRQQTELYVNLRSASIDKEGSLQAHLYAGGGIMPDSDYLSEWEETKLKMQPMHALLSPYITHYCLQ

SEQ ID NO: 94611 - protein, 383 aa, Porphyromonas uenonis
  misc_feature (1)..(383): tr|C2MBE4|C2MBE4_9PORP Isochorismate synthase OS=Porphy romonas uenonis 60-3 OX=596327 GN=PORUE0001_0621 PE=4 S V=1
MLSKRSHKELKGRSCSCDELVTLVAERMNRRAPFACFRLPGEGRTVHEIGLQNEARAVATTTEELREWKKHLAGFLMAPFAVTIETPMLWIEEEQGKQGASVLQLAACDEAELESFPPVAPIPQALPDSYRVTFARFMEHLQDGMAEKLVLAHLVELPSIATAQVVGAFDKALTHYPNAFVSLCYTPQSGLWLCATPEMLLRGDGADWQTVALAGTMPRQADGEPSVWSEKNRREHHYVQRFIGELLEQEGIPYQALDVETTTTGQLQHLQARFALQLPEGYAPITLAERLHPTPAVCGTPQRVAQRLILEEESAERSYYAGFLGWYEPERRVDLFVQIRCLQLLPEQALRLYAGGGIVRGSSLESEWQEVLHKLSAIHSLIR

SEQ ID NO: 94612 - protein, 469 aa, Pradoshia sp.
  misc_feature (1)..(469): tr|A0A5J6XS78|A0A5J6XS78_9BACI Isochorismate synthase O S=Pradoshia sp. D12 OX=2651284 GN=F7984_15750 PE=4 SV=1
MAIKQMTDIQQELTEALHTVKRIAMPILFSHVEAVTNKKPIDIYQSSECLYKGERFYWKDPDNELYLAGIGTARKLQSLTNGEKRFKDIKDKWTALMESAIVNGVNSGKGTGPLCFGGFSFNSKNTEPGSNWSQFGSYLFYIPKFLITETNHGSYLTSSIYLTPHMSDKEVRQFIEDRDAFLSMSDSGQKEMPAIIERQEHIVEEWKQAILKSVEDIRNGQMEKIVLARELSLQFEDEVPSYKVLENLMIQQNGSFIFGLESGDDCFIGASPERLIKKEGPAVFSACLAGSTPRNEDEEIDSALGNELLNDDKNRSEHQFVVNMIKEAMEEHCIEINIPDAPVLMKLKNIQHLYTPVNCVSLPGTSVLDFVELLHPTPALGGSPRNIAMEKIEKYEGMDRGFYAAPIGWMDIYGNGDFSVGIRSGLLKKDKASLYAGCGIVEKSNPESEYMETKVKFKPMLSALEGRNI

SEQ ID NO: 94613 - protein, 440 aa, Pragia fontium
  misc_feature (1)..(440): tr|A0A379DSK9|A0A379DSK9_9GAMM Isochorismate synthase M enF OS=Pragia fontium OX=82985 GN=menF PE=3 SV=1
MKQMSELVKLLHQRLQEAARPQPGRERISVPLTLQQRSSLLPWLAAQPIFPQFYWRQRDDKEEAAVCGEVVRFNDAASARQFLISNDVGNMRIWGLNTFDQVEAPSADRPKSALFLPRIEMLRDADGARLVVNLYSETSLADDVALAQQSLKLLTAGEPLAPLNVKINAVHHQPEKQGWCDLLDQALEAISQGQFEKVVLARQSTLSLNAPLNPAAFLNASAAVNHHCFHFMMRMDRETAFLGSSPECLFLRMGRSLTTEALAGTVASSPDNQEAKRLGDWLMRDKKNQHENLLVVDDICQRLQGGILAIDVLPAEIVRLRKVQHLRRCIHADLAKIDDADSLQRLQPTAAVAGLPREPARQFILQFEPFTRGWYAGSAGYLSLNQTEFAVSLRSALIEGNNIHLYAGAGIVAESDPQQEWLEIENKAAGLRTLLEREDW

SEQ ID NO: 94614 - protein, 437 aa, Pragia sp.
  misc_feature (1)..(437): tr|A0A411WID1|A0A411WID1_9GAMM Isochorismate synthase M enF OS=Pragia sp. CF-458 OX=2498113 GN=menF PE=3 SV=1
MKQISELVTQLHKRLQEVARPEPSRERITVSLTLQQRTSLLSWLAAQPVFPQFYWRQRDDLEEAAVCGEVIRFNDADSARQFLISNNVADMRIWGLNTFDQVETPSLNTPKSALFLPRIELLRDIDGGKLVVNLYSETSLADDVAIALKSIEQLTTSKPLPVLNVTVNSVQHQPEKQGWCDLLNQALAAIQQGQFEKVVLARKSTLSLNEPLNPAAFLNASEKVNHHCFHFMMRMDDKTAFLGSSPECLFLRVDQHLTTEALAGTVASSSDNQQAKQLGDWLMQDKKNQHENLLVVDDICQRLQGGILAIDVLPAEIVRLRKVQHLRRCIHAELAVANDADSLQRLQPTAAVAGLPREPARQFILQHEPFTRDWYAGSAGYISLNQTEFAVSLRSALVEGRNIHLYAGAGIVAGSDPEQEWLEIENKAAGLRTLLEE

SEQ ID NO: 94615 - protein, 384 aa, Prauserella endophytica
  misc_feature (1)..(384): tr|A0A4V5S809|A0A4V5S809_9PSEU Isochorismate synthase O S=Prauserella endophytica OX=1592324 GN=FCN18_21760 PE= 4 SV=1
MDAARLLEDYARGDFFLATAHRTILGSGADTELTGTDEARLAERVRRALTDARTPIAAGVLPFDSAAGGGTPARIVIPEDVRFAGRPHPAVDRLPRRHVGLPERVSPVPEGRRHAEAVADAVRKLGERGLRKVVLARALDLEFTEPVPPEAILHNLVKDNDRGYTFAAGLPGGRTLVGASPELLLSRQGDRVVSHPHAGSMPRSADPVTDRDNGEALLASRKDHIEHAVLAEAVVEALRPFCRKLDAPEEPELVSTPTMWHLGTTITGELADRDVTALHLAAALHPTPAICGTPTKSARELVTELEPFERGYYAGAVGWVDAEGDGEWAVTIRCAEVAERSLRLYAGGGIVPESDPWAELDETSAKFATLAEAMGLPRGWLAEF

SEQ ID NO: 94616 - protein, 352 aa, Prevotella amnii
  misc_feature (1)..(352): tr|E1GVP0|E1GVP0_9BACT Isochorismate synthase OS=Prevot ella amnii CRIS 21A-A OX=679191 GN=HMPREF9018_0844 PE=4 SV=1
MPSFYNFLLTEKIQKGSFALSRLPFSDSCTCYYQASPPSEFYNLNSLNGKKGFIFAPFIASKKYPILLFEDAVSKKITLPPSGEKILLKDFENKDIDISYTKAFNTFYNALQNNLFDKLVLARYVDIKTSHINLESIFLEACKQYPQQHIILVSTPQSGIWLMATPEILLDKINGNIWHTMALAGTMHKDKCNIKWSNKNKEEHNYVVKYILNCLQQYSNSINVSEPFTTFASNLAHLRTDFQFTLTNENNIGNLLSTLHPTPAVCGIPKEAAKDFILSNEGIDRSYYSGFIGPLNINNETHLYVSLRCMQIMDNCCRLYAGGGLLSESKKESEWQETEAKLQTMLQLLQQT

SEQ ID NO: 94617 - protein, 344 aa, Prevotella baroniae
  misc_feature (1)..(344): tr|U2P4X6|U2P4X6_9BACT Isochorismate synthase OS=Prevot ella baroniae F0067 OX=1115809 GN=HMPREF9135_1934 PE=4 SV=1
MMDNYAVYRLPHQKHYMLLSQTDGDLQRVDSVADLSGCRGFVMAPFMQTEECPIVVIRPDVMEEVALPATASPHCHAEPVGSDNLDCYRNDFLLFHEALAAGRFKKLVLARRCDFRHAETDPMALFVQACSLYPRLFIALVSTPLTGTWLFATPEILLEGEGNVWRTMALAGTMKLEAQDLKGEGESSRWSPKNIQEQRYVANYITGCLQKFASDFTEEGPSTVRAADLVHLRSDFTFQLKDDNHLGAMLEALHPTPAVCGLPKKEARDFILLHEHSPRKYYSGFMGPLFPGGQTHLYVSLRCMQLTDQMFHLYAGGGILKDSDVDSEWMETEAKLQTMRNVFK

SEQ ID NO: 94618 - protein, 328 aa, Prevotella bergensis
  misc_feature (1)..(328): tr|D1PXD5|D1PXD5_9BACT Isochorismate synthase OS=Prevot ella bergensis DSM 17361 OX=585502 GN=entC PE=4 SV=1
MAQSKGEPSAYGSVAELDEEEGFVMAPFMVSRQHPVLVMHPDVVENHEIQFQQNHASTKTTAPERPTEKAAYASAFAKFHAETQTRKFGKIVLSRCSPTDLPDDITPQDLFLKACNIYPHQFVALVCLQQAGTWLMATPEILLDGNPEEWHTMALAGTMKREEGIPHVSKTVWTKKNREEQQYVSTYIKDVLSKHADHISEQGPYTVAAAHLLHLRTDFTFKLNNTANIGALIEALYPTPAVCGIPKEKARAFISASEQIDRKYYSGFCGPLSLHGETHLYVALRCMEIVGKTANLYAGGGILHDSNMEREWKETQTKMLTMHRLLNN

SEQ ID NO: 94619 - protein, 334 aa, Prevotella buccae
  misc_feature (1)..(334): tr|D3I0Q0|D3I0Q0_9BACT Isochorismate synthase OS=Prevot ella buccae D17 OX=575611 GN=HMPREF0649_02082 PE=4 SV=1
MDSFAFYRLPEQREYVRMKQTTGSPRTIGSVAELGEQRGFVMAPFAASEDCPIVLLEPDEVSVCPVGDDVEAHIEDCPVREDAERACYQADFARFHARLKSGEFRKIVLARCSEVSLRGPVDTESLFLHACHLYPHQMIALFSSPLTGTWLMATPEVLLDGDGCRWRTMALAGTMKTDGPWSEKNREEQRYVAGYIMDCLTRYGENVSRSATYTRSAARLCHLCTDFEFDLAPGCRVGDLLDALYPTPAVCGIPKEETRRYILDNEHTPRLYYSGFLGPLDPVGETHLFVSLRCMKIGAGLQLYAGGGLLTDSREEREWEETEDKLNTMRHVFE

SEQ ID NO: 94620 - protein, 371 aa, Prevotella buccalis
  misc_feature (1)..(371): tr|D1W646|D1W646_9BACT Isochorismate synthase OS=Prevot ella buccalis ATCC 35310 OX=679190 GN=HMPREF0650_1634 P E=4 SV=1
MSSIAYYRLPHAEHFIRLEQTQGEPEVLTRLTELNGREGFVMAPFTIDAAHPIVLMHPDKVQEENINESDPCSCQRDGRLMDAEKQEERLAYGRDFRQFHQALKAEKFDKLVLARSEEVERCDGANAESLFLAACRCYPRQAIVLVCTPMTGTWLMATPEVLLSGDGERWRTMALAGTMKLNDDESQPVMSRQLAGNKLSVGERVWSDKNRQEQRCVAMYIQQSLVPFAAHVEERGPYTVQAGGLVHLRTDFTFELRDPNQLGTLLEALHPTPAVCGLPKAEAHRFILQNEHIHRSYYSGFVGLLNPKGETHLYVSLRCMQISDRSYRFYAGGGLLADSIEQQEWEETVAKMETMKKVVASPPTPPQREGE

SEQ ID NO: 94621 - protein, 392 aa, Prevotella copri
  misc_feature (1)..(392): tr|D1PBC3|D1PBC3_9BACT Isochorismate synthase OS=Prevot ella copri DSM 18205 OX=537011 GN=PREVCOP_04502 PE=4 SV =1
MIAFAYYRLPYLHHATYVAQHEGEPEVLSSVAELNGKEGFVIAPFAPSSECPVVLMHPDESKLLSAEGTENASRCGTSYVVTQQKLRRDVAESTSGRNFKAYAREFECFHRQISEGKFSKIVLARKLRILSHRQPLESVQTSAVQDAGKTSAVQNTANASVVQDADSLKALFLKTCRMYPRLFVALVYTPQSGLWLMATPEILLKGEQNQMATMSLAGTQKAEPSKTVADYPVEGIEWSEKNREEQQYVTDYIEDCIKVFSDDYQKKGPYTTMAANLYHLRTDIAFRLHDTGRLGDVLDALYPTPAVCGIPKDEARRFILQHEHQSRKYYSGFVGPISPKGKTHLYVSLRCMNILDDGSCELYAGGGLLKESEMEKEWKETEAKMQTILSVL

SEQ ID NO: 94622 - protein, 358 aa, Prevotella dentalis
  misc_feature (1)..(358): tr|F9D4I6|F9D4I6_PREDD Isochorismate synthase EntC OS=P revotella dentalis (strain ATCC 49559 / DSM 3688 / JCM 13448 / NCTC 12043 / ES 2772) OX=908937 GN=entC PE=4 SV =1
MRRNLVNYAYWRLPETNRCIFMAQADGEPEQLKTVADLDGRSGWVMAPFEPSADCPILLMHPDVVEELPTDGPPTGEAVPSTPCDGDRLWPELQVEGGADTAERQVYHRDFVRFHHEIVAGRFAKLVLSRRATVKGANVRAEQLFWKACRLYPHQFIALVSLRHAGTWLVATPEVLLSGNGDDWRTMALAGTMNAGGHRPADVAWSAKNVSEQQCVSSYIKEVLDGFARQVSSTGPYTTQAAHLLHLRTDFHFSLSDTAHLGRLLSALHPTPAVCGIPKEEARRFILGQESVERKYYSGFCGPLQPHGDTHLYVSLRCMEIQPDGCRLYAGGGLLPESREESEWLETQNKLQTMLRLL

SEQ ID NO: 94623 - protein, 348 aa, Prevotella denticola
  misc_feature (1)..(348): tr|F0H4U6|F0H4U6_9BACT Isochorismate synthase OS=Prevot ella denticola CRIS 18C-A OX=944557 GN=HMPREF9303_2045 PE=4 SV=1
MEPFFMYREPFDRTLHCYTQQERPVLFRSLPELDGHEGFVIAPFSCDAEHPICLLNGESGCSRDLPLDREASFEAVPDWQTGSMAVHLPGHIRADYHADFIRFHGELEDGMFRKLVLARSAVEYKDEKLTPRSIFIKACKSYPRSYIALFYTEETGMWLIASPEILLRGSADGYQTMALAGTMKYEGEDMEWSAKNREEQQLVAEYIRTGLQPFAAEIAESTPYTARAAHLAHLRTDFTFHLRDRKRLGSFLSVFHPTPAVCGMPKEAARQFILRNEHLQRSYYSGFSGLIGRSGQARLYVTLRCMQLSRTVCRLYAGGGILKESNEENEWQETEAKLDTMRQLLRSD

SEQ ID NO: 94624 - protein, 338 aa, Prevotella disiens
  misc_feature (1)..(338): tr|A0A3E4QL65|A0A3E4QL65_9BACT Isochorismate synthase O S=Prevotella disiens OX=28130 GN=DXC89_04325 PE=4 SV=1
MRSFAIYRLPCAKECTKMVQQTAPLEVASLQDLNGKTGFVIVPFMPSAQCPILLLQPEEVVTLAVKQPETILKKEVKPTERKEYRDDYHKDFAVFHEQICNGRFSKIVLSRCVEEEKSSNLQAEKVFWRACQCYPRQFVALFSTPQTGTWLMATPEILLDGNSSNWKTMALAGTMPYQSDEIIWSEKNKAEQQYVAKYIRQCLEQHATDIEEQGVYTAQAANLAHLRTDFKFQLKDNTQIGTLLNTLHPTPAVCGIEKETARKFILDNETTPRRYYSGFAGALNLNGNTHLYVSLRCMEIMETKCRLYAGGGLLTDSTEESEWQETEAKLATMRQLLE

SEQ ID NO: 94625 - protein, 338 aa, Prevotella intermedia
  misc_feature (1)..(338): tr|A0A3R8HHE5|A0A3R8HHE5_PREIN Isochorismate synthase O S=Prevotella intermedia OX=28131 GN=D2S45_10535 PE=4 SV =1
MRSFAIYRLPFAEECTMLVQHSAPSELSSLTELNGKEGFVIAPFSPSADCPILLLQPDEVRTMPVKEVQPLTKKEEEANEKEADRAKYHRDFNAFHKELANNKFAKIVLSRCVQEQIPHDLQPEKVFWQACKKYPRQFVALFSTPQSGIWLMATPEILLDGDGSEWRTMALAGTMPYNENGVEWSAKNKAEQQYVSLYIKRCLERCADEIKEEGAYTTQAADLVHLRTDFSFKLRPDAAIGQLLSDLHPTPAVCGMPKDETKAFILANESNKRLYYSGFAGPLNLQGNTHIYVSLRCMQMQAGVCNLYAGGGMLKESTEESEWKETEAKLSTMRQLLR

SEQ ID NO: 94626 - protein, 339 aa, Prevotella marshii
  misc_feature (1)..(339): tr|E0NVS2|E0NVS2_9BACT Isochorismate synthase OS=Prevot ella marshii DSM 16973 = JCM 13450 OX=862515 GN=HMPREF0 658_2277 PE=4 SV=1
MDSRALIRLPHYTHYTEVRQTTGRLQELHDLHALDGRVGFVFAPFMPSKQEPILLIRPDSMEQHEVSMPKHLPAQRRVLDEETDKAQYMADFNSFHKPLKQDLFRKIVLARCSEQTTDETPLPDELFLHACRLFPHLCVALVSTPVSGTWLIATPEVFLESMGSQWHTMALAGTMEATTDEPCWSMKNQEEQRCVATYIRECLKPFSTRITEEAPHASQAGHLLHLRSDFLFTLKNPSHLGALIAELHPTPAVCGMPKEETRRFILRHEHAPRRYYSGFMGLLAPEADTHLYVSLRCMQIDGNHYRLYAGGGLMKDSTPMQEWEETRAKLETMQRCITL

SEQ ID NO: 94627 - protein, 348 aa, Prevotella melaninogenica
  misc_feature (1)..(348): tr|D9RS82|D9RS82_PREMB Isochorismate synthase OS=Prevot ella melaninogenica (strain ATCC 25845 / DSM 7089 / JCM 6325 / VPI 2381 / B282) OX=553174 GN=HMPREF0659_A6048 PE=4 SV=1
MDAFFIYREPFEKVCHCYSQPEKPTAISSLAELNGRKGFVIAPFFCDDSNILYLLDGQKGSSTVLPLDGSKGFDAIPDWQDEAVLTNETPSLREAYHNDFCRFHKELEHNRFRKLVLARSIIETKDERTTPRSIFLKACEKYPRSYIALFYTAEIGMWLIASPEVLLRGNAEGYQTMALAGTMKYEGEDMKWSSKNQEEQQLVADYIRACLQPFAAEITESKPYTTRAAHLAHLRTDFTFQLKDTQRLGTFLTAFHPTPAVCGMPKDEAQQFILHNEQLNRSYYSGFSGLLGEKGAAKLYVTLRCMQLSRSTCRLYAGGGLLKESIEENEWQETEAKLDTMRQLLKHN

SEQ ID NO: 94628 - protein, 347 aa, Prevotella multiformis
  misc_feature (1)..(347): tr|F0F9H1|F0F9H1_9BACT Isochorismate synthase OS=Prevot ella multiformis DSM 16608 OX=888743 GN=entC PE=4 SV=1
MEPFFVYREPFEKVCHCYTQPEPPAVIRQLSELDGREGFVIAPFSCSTDCPACLLDGQGGALRHLPLDNSNGFEAIPDWQPDDLTAEPADCTRAHYHADFIRFHSELEAGTYRKLVLARSAVEHKAGTLTPRTVFLKACERYPRSYIALFYTAQTGMWLIASPEILLRGGAEGYQTMALAGTMRYEGADRAWSAKDREEQRLVADYIRAGLQPFADGIAENGPYTARAAHLAHLRTDFHFRFRDTLRLGSFLSAFHPTPAVCGMPKEAACRFILRSEHLSRSYYSGFSGRIGDGRAMLYVTLRCMQLSRTVCRLYAGGGLLKESIEENEWQETEAKLDTMRQLLRSD

SEQ ID NO: 94629 - protein, 338 aa, Prevotella nigrescens
  misc_feature (1)..(338): tr|F9DA95|F9DA95_9BACT Isochorismate synthase entC OS=P revotella nigrescens ATCC 33563 OX=997352 GN=entC PE=4 SV=1
MRSFAVYRLPFAEECTMLVRHSAPSELSSLTELNGKEGFVIAPFSPSADCPILLLQPDEVRMMPVKEVQSLAKEKQEASEKEADRAKYHRDFAAFHKELANNKFAKIVLSRCVQEQIPHDLQPEEVFWQACKKYPRQFVALFSTPQSGIWLMATPEILLDGNGTEWRTMALAGTMPYNENGIEWSAKNKAEQQYVSLYIKRCLERCADEIKEEGAYTTQAADLVHLRTDFSFKLRPDAAIGQLLSDLHPTPAVCGMPKDETKAFILANESNKRLYYSGFAGPLNLQGNTHIYVSLRCMQMQTGVCNLYAGGGILKESTEESEWKETEAKLSTMRQLLR

SEQ ID NO: 94630 - protein, 348 aa, Prevotella oralis
  misc_feature (1)..(348): tr|E7RR92|E7RR92_9BACT Isochorismate synthase OS=Prevot ella oralis ATCC 33269 OX=873533 GN=HMPREF0663_11693 PE =4 SV=1
MSSYVMFRLPEAAEYSVVRLAADEPEKLYSAGALSGKSGFVFAPFFPSQEHPVLLFATDEISILPLPPAEMPQAGQTEIVCRNDGRRQYAADFTRFHRELAAGNFAKLVLSRCCEVETAVSLSPETLFMRACHLYPSMFVALISAPESGTWLMATPEILVETAGTEYRTIALAGTMKGKRDAVDWSLKNREEQRYVAAYVRECLKDIAADITEQGPQTVRAADLLHLRSDFTFRLNDGQTIGSLLEALHPTPAVCGLPKDKARRFILSNESVAREYYSGFAGITGVCGTTQLYVTLRCMQIDGRKCRLYAGGGLLPSSTEQQEWDETEAKMQTMMRCLCAEQNTENDV

SEQ ID NO: 94631 - protein, 334 aa, Prevotella oris
  misc_feature (1)..(334): tr|D1QUV6|D1QUV6_9BACT Isochorismate synthase OS=Prevot ella oris F0302 OX=649760 GN=HMPREF0971_02792 PE=4 SV=1
MTATVVYRLPDTDHYVHIRSRHEPLRLSSYEELNGQQGFVFSPFAVSEDTPLLLIRPDEVEVLPFRPSDNDTVSVEKVLFDREEYHKDFQCFHTELLNRHFQKIVLSRHVDVKCCERPSPMHLFVKACTLYPHQFICLISMQQSGTWLMATPEVLIEKQAGSPAWHTMALAGTMRKEGPWSEKDCREQQYVADYIAQHLANHAIEVRRSQPYTRIAAHLYHRCTDFHFILKDDRYIGNVISSLHPTPAVCGIPKRETQDFILQHESHNRKYYSGFCGPLQMNDATHLYVSLRCMLLMEQNCRLYAGGGLLDNSDETREWRETEYKLNTMLDVLR

SEQ ID NO: 94632 - protein, 364 aa, Prevotella oryzae
  misc_feature (1)..(364): tr|A0A010YCC2|A0A010YCC2_9BACT Isochorismate synthase f amily protein OS=Prevotella oryzae DSM 17970 OX=915438 GN=XylorDRAFT_0225 PE=4 SV=1
MSSFALYRFPHENYCTLLSQKMRQPIELLSYSDLSGKEGFVIAPFNASKDEPILLLESEKTKKILLSDFDYTFKNSNSDSENYFDAVYEGAERLKYTVDYENFSSQIASGKFSKIVLARRKVVKSKLEIAPEELFKRACKLYPRMFIALVHTERSGTWLTASPEILLEGHERNWRTIALAGTMKLEGCQLNFDASNEMCDSDMIKWSDKNIQEQGYVAKYIKECLDKFSNNVVEEGPFTVRAGNLVHLRSNFDFTLQTSDNIGELINSLHPTPAVCGLPKDTARRFILKNESVPRHYYSGFMGPLNTQYGTHLYVSLRCMNIEGRTYKLHAGGGLVKNSEEAMEWKETEDKIETMGKCLVTKKI

SEQ ID NO: 94633 - protein, 338 aa, Prevotella pallens
  misc_feature (1)..(338): tr|A0A379EZH6|A0A379EZH6_9BACT Isochorismate synthase d hbC OS=Prevotella pallens OX=60133 GN=dhbC PE=4 SV=1
MHTFAIYRLPFATECTMLIQYSAPLVLSSLTELEGKKGFVIAPFNVSDKCPILLLQPNEVRTMPIKQVQSKPKEKQNTSENEVYRMQYHRDFVAFHKELTNNRFAKIVLARCVQEQIPHNLKTEEVFWQACKEYPRQFVALFSTPQSGTWLMATPEILLDGDGIEWRTMALAGTMPYNENGAEWSAKNKAEQQYVSLYIKRCLKCYADEIKEEGPYTTQAANLVHLRTDFTFKLRPNATVGQLLHNLHPTPAVCGMPKDEAKSFIMANESNERLYYSGFAGPLNLNGNTHLYVSLRCMQMQTNTCKLYAGGGILKESTEESEWKETEAKLSAMQQLLR

SEQ ID NO: 94634 - protein, 344 aa, Prevotella pleuritidis
  misc_feature (1)..(344): tr|U2MS09|U2MS09_9BACT Isochorismate synthase OS=Prevot ella pleuritidis F0068 OX=1081904 GN=HMPREF1218_2232 PE =4 SV=1
MESFAYYRLPFCNRYTLLRQSCGRPRALSSAAELGRQSGFVIAPFAVSTDCPMLLLTPDEVEEHPVPLLETVLQTPIPITITTDRAGYSADFVRFHRSICNGTFSKIVLARSAEVVANEVVGAEALFFRACCLYPQLFVSLFSVPACGTWLMATPEILLDGNRSDWHTMALAGTMKWRGEVCGEALWSDKNIQEQRYVSTYLAHCLGRFGAGITETEPRTVRAGQLVHLRSDFRFTLPDGRKIGNLINALHPTPAICGLPKDEAYRFILANEHISRRYYSGFAGPFDPDGTTHLYVSLRCMQIFDNYYRLYAGGGLLSDSTEQQEWDETEAKMETALEVFKLMS

SEQ ID NO: 94635 - protein, 346 aa, Prevotella ruminicola
  misc_feature (1)..(346): tr|D5ETM7|D5ETM7_PRER2 Menaquinone-specific isochorisma te synthase OS=Prevotella ruminicola (strain ATCC 19189 / JCM 8958 / 23) OX=264731 GN=menF PE=4 SV=1
MSAYAIYRLPHEDHATLITQSVGEPMELHSLTELNGKQGFVVAPFEVKADQPVVLIQGKTEMIALSNEQLTADDGKNRLPSDMSNYYKVDFANYHSQLEADKFRKIVLARCADEQMPNGVKPIDLFYRACQLYPRLFIALVDTEKSGCWLTATPEILLDGHGADWRTIALAGTMKLEGDQLDGEGETLTWSTKNIQEQRIVATYITECLELFTGDFREEGPRTVRAANLVHLRSDFTFKLADNNKIGDLLQALHPTPAVCGLPKREAFKFIVKNEHTPRRYYSGFMGPVALEDTHLYVSLRCMNIDGDVCHLYAGGGLLKDSVEEQEWLETEAKMETMKKLLYVQQ

SEQ ID NO: 94636 - protein, 334 aa, Prevotella salivae
  misc_feature (1)..(334): tr|E6ML99|E6ML99_9BACT Isochorismate synthase OS=Prevot ella salivae DSM 15606 OX=888832 GN=HMPREF9420_0266 PE= 4 SV=1
MSSFVAYRLPEAKDYVYIRSQKAPIVLSTYTELVGKEGFVVAPFAISESTPLLLIQADSIDTKTCFADNLIARRIKKENEDPLSYHSDFENFHAELLNHHFQKIVLSRHVDVKCDTTPNPMHLFLKACALYPHQFICLVSTEQSGTWLMATPEILVEQQDKESPWHTMALAGTMRKDGPWDEKDCREQEYVADYIEQCLADYATDIYRSQPYTRKAATLYHRCSDFEFRLKDGVSIGNVISALHPTPAVCGIPKHETQAFIMRNESHDREYYSGFCGPLHLNGSSHLFVSLRCMKLVGERCRLFSGGGLLDQSDEKHEWRETEYKLNTMMDVLR

SEQ ID NO: 94637 - protein, 348 aa, Prevotella sp.
  misc_feature (1)..(348): tr|A0A3R6FJG3|A0A3R6FJG3_9BACT Isochorismate synthase O S=Prevotella sp. AM34-19LB OX=2292364 GN=DW830_06235 PE =4 SV=1
MTAFAYYRLPYLHHAHYVAQREGEPEVLSSVAELNGKEGFVIAPFSPSGDCPVLLIHPDESKLLPISDAKAISISDSAQGEDASDRDAYAEDFECFHQELEKGTFRKIVLARKATVRTADKDFENLFMKACRMYPRLFVSLVYTPQSGMWLMATPEILLKGEQGNMSTMSLAGTQKAEPSRTVADYPVEGVEWSHKNQEEQQYVTDYIEDCIKAFADDYQLKGPYTTMAANLYHLRTDISFRLRNEGRLGDVIDALYPTPAVCGIQKEEARRFILQHEHQPRKYYSGFVGPISPQGKTHLFVSLRCMNILPDGVCELYAGGGLLKESEMEKEWKETEAKMQTIRRVLL

SEQ ID NO: 94638 - protein, 369 aa, Prevotella stercorea
  misc_feature (1)..(369): tr|A0A3R6K3Y8|A0A3R6K3Y8_9BACT Isochorismate synthase O S=Prevotella stercorea OX=363265 GN=DW060_11705 PE=4 SV =1
MSYVYFRLPHSTHVFRNRLSTEPEEIASLAELNGRRGFVITPFTPSDDCPILLLPTDWEEVDLNFSGDNQNGEQTHLSSTDGVSAMLLDADYEKERQRYAVDFHNYHGQLTNDAFQKIVLARSARLIATEKLSPLTLFARACHRYPRMFVALFSTERSGTWLIATPETLISGTNGAMQTMALAGTMRLSGANLNFDVEGGSIGKDDIHWSTKNIKEQRYVETYITECVEQFSDDVNVEGPFTVRAGDLVHLRSDIRFHLKDTAHLGNLINTLHPTPAVCGMPKDATRDFIINNESGERNYYSGFSGLLDPNGDTRLFVTLRCMQIESESEATTYRLYAGGGLLKDSQCQSEWEETEAKMNTMRQLFKHI

SEQ ID NO: 94639 - protein, 371 aa, Prevotella timonensis
  misc_feature (1)..(371): tr|D1W1B1|D1W1B1_9BACT Isochorismate synthase OS=Prevot ella timonensis CRIS 5C-B1 OX=679189 GN=HMPREF9019_1531 PE=4 SV=1
MNSFAYYRLPDNRHFIKLTQKNGEPETYFSLTDLNGKEGFVLVPFKIDEAHPVVLIHPEKKERVRISKCSARLHDEYGATTLATSSDGRERYGEVFRCFHQQLKDGKLAKIVLARREEISHLATIDAEAMFLEACRIYPHLCIMLVSTPQTGTWLMATPEVLLDGDGETWRTMALAGTMKAEGLPPDADCSSASTPWVDGNDMCDWSAKNKHEQQLVATYIQQCLSPFTAQLTQRGPYTVQAGDLVHLRSDFMFSLHDTKSLGSLLEALHPTPAVCGLPKAEAQRFILENEHADRSYYSGFAGLLNPNGETHLYVSLRCMQILEKSYRLYAGGGLLLDSVEQQEWEETVAKMETMKKIVASPPTPPQKGGE

SEQ ID NO: 94640 - protein, 347 aa, Prevotella veroralis
  misc_feature (1)..(347): tr|C9MMG0|C9MMG0_9BACT Isochorismate synthase OS=Prevot ella veroralis F0319 OX=649761 GN=HMPREF0973_00790 PE=4 SV=1
MDAFFIYREPFEEVCHYYSQQEEPTRLGSLTELDGHKGFVIAPFASNTTHPIYLLNGQSGQSSVLPLDGSKGFEAIPNGQDEAYLETSEIDPRIQYHNDFTCFHDELNRKSFRKLVLARTIVEKKDELLSPREIFLKACEWYPRSYIALFYTAQTGMWLVASPEILLRGDATSYQTMALAGTMRYEGEDIQWSEKNREEQQLVADYIRTCLQPFAIDITESEPFTSRAAHLAHLRTDFSFRLKDTQRLGSFLTAFHPTPAVCGIPKEEAHKFILRNEHTDRLYYSGFSGLLGNDGLAKLYVTLRCMHITRSACQLYAGGGLLKESIEENEWQETEAKLATMRQLIQQ

SEQ ID NO: 94641 - protein, 470 aa, Prochlorococcus marinus
  misc_feature (1)..(470): tr|A0A0A1ZJJ1|A0A0A1ZJJ1_PROMR Isochorismate synthase M enaquinone-specific isochorismate synthase OS=Prochloro coccus marinus str. GP2 OX=59925 GN=EU91_0347 PE=4 SV=1
MKNDLNLTDFLKDVFSSFDKKVENSGLVSICIEIPRIDLLQVYKLFINKYPFSSFWEESNGISYIAFEKCKYVTLDGPKRFEVAKEFNSENFKNLINLTNESNNWALSKIIYLFSFSENLNNKNLSSDVPSLEAILPKILIIKSNKNCWLRINGYVEGKSSLRTLIEEIWTIRNQVITSGSKLIKSSGLNTSFDLPIIDDFLHSLETSNASLKKVLNRGIQLVEKGILEKIVLANRIKIKFRNKFDLVEILKRLKKNHPNTCRYVWKRNSKDILFGASPEKLFSFTKPNLTLEALAGTISTNSNYKKLLKSTKDVKEHNYVTQYLIKCLEVSKIKNFEKSDIKVNSFGDISHLQTLIFSKVENICPFELLKNLHPSPAVCGYPKNAALDWINTLESFPRGNYASPMGWVDSSGNASFLLAIRGARYLEENIEFTAGSGIVSGSVLEKEIDEIKLKFESIVKQIFFAKKPK

SEQ ID NO: 94642 - protein, 473 aa, Prochlorococcus sp.
  misc_feature (1)..(473): tr|A0A0A2CNL9|A0A0A2CNL9_9PROC Isochorismate synthase M enaquinone-specific isochorismate synthase OS=Prochloro coccus sp. MIT 0701 OX=1499502 GN=EV12_1392 PE=4 SV=1
MTADRSFSNLLTAASRGWCERKGDEGVLSLALPLDEVDPLYHLPLLADEHPFQFLWDSAPGLCFAAAGQCQSLDLAGPRRFEVAQRFSDTTLARLTDATPNAPAQARPKILLAFSFFDHPAERQRSQIRTSAVQAVLPRWQLSRQGRHGWLRLNGVITQQAEARDLAEQLWLMAENLLDPNHNSKDCWPSSVRGTTELQPWQECYRPALKRGLDLVSSGELNKLVLAVRQSIQLQTPLNPLPVLVKLRQQQSGSCRFLWRRTHEDAFFGASPERLLSLQGHQLRTDALAGTADRNDDGQELLRSEKDRREHELVVASITSQLCNQGLTPRRPRNPQLARHGQLVHLHTPITANAIGQTSLNLAKILHPTPAVAGLPCREAMAWLRTLEPFERGSYAAPIGWIDSQGDTELRVAIRCGHARGTVLDLTAGAGLVRGSVVERELQEVGMKLSVLADQLDLRTKDQPRLSSKRAIT

SEQ ID NO: 94643 - protein, 375 aa, Prolixibacteraceae bacterium
  misc_feature (1)..(375): tr|A0A4U2LES8|A0A4U2LES8_9BACT Isochorismate synthase O S=Prolixibacteraceae bacterium JC036 OX=2528631 GN=EYV9 4_17555 PE=4 SV=1
MKEFVDKIDVLLDAGCPFALYFYPGSQKPELVFQENRTLETVNSIHQLDGKKAFVMAPFHVSEDEPIICIEPDEVLHGYKSIMQFKVPVDVKLDNQWEEISALSGGQSEEKEEYTQKIESLVQDIQQGKFAKVVFARSIEETFNPNCQLGNLLLELKKKADQAFVYMVNLPGRAVWVGATPEIILEKQGDWLKTVALAGTIDAQNNQSEWSDKEIKEQQFVVDFVRDQLRKNGVERYKASERETVIAGNVAHLKTNFVFSEVDLKNDLVALLEDLHPTPAVCGLPKEDARDYILDREVHNRAYYSGFIGPWYVSDDACRLFVNLRCMKLTRGNAQIFVGGGITAGSDAAREWRETELKATNLQLVLKKYGSENII

SEQ ID NO: 94644 - protein, 441 aa, Propionibacteriaceae bacterium
  misc_feature (1)..(441): tr|A0A367YVB2|A0A367YVB2_9ACTN Isochorismate synthase O S=Propionibacteriaceae bacterium 16Sb5-5 OX=2268447 GN= DT076_09490 PE=4 SV=1
MLVHSSAPVFVRSTLLPGTGIDAVLDLLRRGPAGGVDFGWLHGEDGAVGGGAAVRWEPRPGEGTGAAASWWDGVCARLEHTGDSAGHASLAFGSFPFDPGHTRAAPVLVLPEWVLVHRHGGTVLLEASTRPFPVPATARLDALLGAVDQAPQEPVGLHEEHEALDAEQWAERVARGVKRILVGDLDKVVLARQVTVRGDRPLPVGRLARRLHASYPRCWTFLVDGLVGASPEMLVRREEGLVTSRVLAGTIGVSGATPETLGAALASSSKDLLEHEYAVASVASALAPYCDGMNVPSAPYVLELPNVLHLATEITAATSPMTSVLELVGALHPSAAVCGTPTPTARRLIAELESMDRGRYSGPVGWVDSTGDGAWAIALRCGQVDPDDSRVVRLFAGCGIVADSDPDAEVAESEAKLVPMRTALAEASAATGRVASGTGAR

SEQ ID NO: 94645 - protein, 388 aa, Propionibacterium acidifaciens
  misc_feature (1)..(388): tr|U2Q5G0|U2Q5G0_9ACTN Isochorismate synthase OS=Propio nibacterium acidifaciens F0233 OX=553198 GN=HMPREF0682_ 2880 PE=4 SV=1
MMSSSSAAREPRFEFASSGRHLVATGVVRHVEPRSWVGTGVARAVEEVLAAPLEAPQLVVGVLPFDSARPGMLYRPAEACWRSCAFPGRPEPFAPSASTTAVTDRRPSHQGYRCLVAKAVETIRSGGLDKVVLGRCATVCAAAPWDPQSVFVRLGIQNPDAFVYLIDVPGGYGGEFAQEGVFLGASPELVLSCSGSRVRTVPLAGTTARWSEPERDERASEALLESGKDLAEHSYVVRAIARVFRARTDDPRIPSRPRLVPTPAVWHLGTEITGTLRGGASPFELLYELHPTPAVCGWPHERARDFIVDHEGFDRGLFAGLIGWIDADRNCEWALALRGGVLRGDRATMFAGAGVIATSEPEAELRETAAKMRTFLAALGGQEGRTDP

SEQ ID NO: 94646 - protein, 403 aa, Propionibacterium australiense
  misc_feature (1)..(403): tr|A0A383S3H5|A0A383S3H5_9ACTN ADC synthase OS=Propioni bacterium australiense OX=119981 GN=dhbC PE=4 SV=1
MRASTAAIADPGPLTDFLDGSGAAFLRGQDGFIALGQMARLDDVSMDEADGWWEEFSAQIENETEMPEAFGTGPIAYGSFTYDPARTSQRSCFVVPEVIVGRREGRCWVTRLGYDRVDPVLPERHGPATAPGRVRFETSEEANQEWLDHFNRVKEYITAGRADRVVLLRQLDALAEGELDPRWVLHRWRLGYGGSWAYLVSGLVGATHEVMVRRRGGLTVSRILAGSVQALGGMDEATRTAQLLSSSERLSQHHHAVAAAAESLSPFMTGMHVPRQPFALSLPDGLNLATDICGVASPGHSCLALASALHPLASVTGSPLAAAREIIDETSTIDRGRFGAPVGWIDAQGDGEWFAALRACQLGQRGGARLYASATVSAGTSAHDKLVSTQVKLSQMRRLLTER

SEQ ID NO: 94647 - protein, 412 aa, Propionibacterium freudenreichii
  misc_feature (1)..(412): tr|D7GIX2|D7GIX2_PROFC Menaquinone-specific isochorisma te synthase OS=Propionibacterium freudenreichii subsp. shermanii (strain ATCC 9614 / DSM 4902 / CIP 103027 / N CIMB 8099 / CIRM-BIA1) OX=754252 GN=dhbC PE=4 SV
MIINPGSSRLHASTIAIDDPGALTQYVDGHGAAFLRGEDGFVAMGEVARLDGATMSEADQWWTQLAADIEKESEMPGLVGTGPLAYGTFTFDPEHTAAASAFIVPETIIGRRDGVSWLTQLGYDRVNPQMPEVQPAPQPPAELFFEDGQISGADWLALIARTSAALRASGAEGVVLARDLHAIAEQKICPAWLLHQWRRNYGGSTCYLVDGLVGATPEILVHRRGGLTTSRILAGTTQRLDNVDEPAEIARLLSSQQRMHQHRLSVESAATALGAHMSGIHVPEAPFVLALPDMLHLVTDICGVTEGTFSTLALAAAVHPLSSVTGFPTDQARTILANSGFDRGRFCAPVGWIDAQGDGDWFVALRAAQLSPDWKGVTLYASASVDPDTAPHNKLVSTEMKFALMRQFLAGD

SEQ ID NO: 94648 - protein, 407 aa, Propioniciclava sinopodophylli
  misc_feature (1)..(407): tr|A0A4Q9KB29|A0A4Q9KB29_9ACTN Isochorismate synthase O S=Propioniciclava sinopodophylli OX=1837344 GN=ET989_12 955 PE=4 SV=1
MTTGAAGQHTLQVQEPFATSLRRGLPLVWATGSGDDLTATLGWGEAFRATARGLDRFGTLDDAFTRWAARQGPDANPVAFATLTFAHDSSAESVLVVPQLIGRWAGGVLTVASQVAEPVGARLPRPSVPGEFEELELLPGTLTRQRYRQAVAAAVGRIADGEVEKVVIARDLLATSPDPLDVPALLARLQEANTASWTFHVDGLVGSSPEMLVATTGDRVHSQVLAGSAPVTGDVGLDDVTATRLAASAKDHAEHAYAARSVAERLETVATVSTRDPQVKRLRRIMHLATDITGTLHDHHSALALAGIVHPSAAVCGTPTDVAFRVIAELEGFDRGRYAGPVGWVDARGDGEFVIALRCGQVTADGTAIRLFAGGGIVAGSVPSDELAETARKFLPMYEALSPVDRP

SEQ ID NO: 94649 - protein, 437 aa, Propioniciclava tarda
  misc_feature (1)..(437): tr|A0A4Q9KJ88|A0A4Q9KJ88_9ACTN Isochorismate synthase O S=Propioniciclava tarda OX=433330 GN=ET996_11030 PE=4 S V=1
MCPIARTGLSSSSVTVDPALPRLRACTVAIDDPGDLLDYLAEASDVAWIRRGDGLVGLGVAARVDVASLDDGAEWWKALSARIEHSTELPGAWGVGPLAFGSFAFDAGHTASTSVLIVPELIIGRRSGQSWLTAISADGHSPVLPAKAPDSDGPGRVEVRPVGLDAAGYAREVGRLVERINDPDSELAKVVLARALRAMGERPVEARWLAKRLASAYPSCWTFHVDGLVGASPEMLIRAEGGLATSRVLAGTIRRSDASQDEALADALSGSGKDLEEHEFAVASVANALRPFCSGMNVPDAPFVLQLPNVMHLASDVTGVMAGAFSALHLAGRLHPSAAVCGTPTAAALAAIAEHEHLDRGRYAGPVGWIDTHGDGEWAIALRCGQIAQDAASITLYAGCGIVGRSRPDAEVAETEAKLAPMLGALGVSPGAALGRS

SEQ ID NO: 94650 - protein, 408 aa, Propionispora sp.
  misc_feature (1)..(408): tr|A0A0K8JCF0|A0A0K8JCF0_9FIRM Isochorismate synthase D hbC OS=Propionispora sp. 2/2-37 OX=1677858 GN=dhbC PE=4 SV=1
MRRDFAVLEKQLLEDYQAGDFFFASPGGTLLGKGCFAVVQQERGKGKREKGLVQQVDAVLRQAKVQGFNNPVVTGAVPFDARQKARLIVPATLAVSDRLPLDVKAAFKPPVTSAYAVKSIPEPQAYSAGVAKGIDYIKSGRLSKIVLSRALQLTSSAAVDIHQLLCNLAQHNLKGYTFAVNLADMVPDQPGTDSALERNTLIGASPELLIARSGLQVTANPLAGSRPRGDTAAEDRRLAGELLSSRKDLHEHEVVVQAVAAALKPYCRKLTVPEAPSLINTEAVWHLSTKITAEIADPAVSSLELAMALHPTPAVCGSPTEAARAAIERIEPFDRGFFTGIVGWCDATGNGEWAVAIRCAEIQAQSLCLFAGAGVVAGSKPEEELAETAAKFRTMLTAMGIDKEVAGV

SEQ ID NO: 94651 - protein, 475 aa, Prosthecochloris aestuarii
  misc_feature (1)..(475): tr|B4S4J3|B4S4J3_PROA2 Isochorismate synthase MenF OS=P rosthecochloris aestuarii (strain DSM 271 / SK 413) OX= 290512 GN=menF PE=3 SV=1
MSNMTDIIINAAEEPQPLLPAVDMIRKSISGYATGSDRHDIATGLVTFTVPLLPSIDALQWLNSQSIYPRTYWMNREGDDIAAGIGQADSIVYDHQGPNRRSFELLQQHITARQHNARYFGGCCFDNVQQRDPGWKPFKSLYFILPEIQITVTDRENTLSCHLFLDGRTPVNQLCARLMATLEAMQPVVTPSPDCNLPDVTSTSFKPDMKQWIEICNKALEKFQKGFMGKMILARQTTLKFSVPFSPLLFLIKYPFPDSSTYRYYFEPEKNKAFFSFTPERLYRRDHDRLLTEALAGTCSKQALEEDSIDACRHLLNSEKDIREHRFVKDTILKELSPICSTIDMEEEVRALQLNSLVHLYTRCKATLNPESSNDATVLSSLHPTPAVGGVPRDEALQQIIDLEPFSRGWYAGPIGWISRQSSEFAVGIRSARSDGQTVFLYSGAGLVKGSNPASEWQEVDHKIGDMLAIIRQTL

SEQ ID NO: 94652 - protein, 471 aa, Prosthecochloris marina
  misc_feature (1)..(471): tr|A0A317T7M4|A0A317T7M4_9CHLB Isochorismate synthase M enF OS=Prosthecochloris marina OX=2017681 GN=menF PE=3 SV=1
MNKPTDIIEQVSEPLPMKKALSTLQKMVLDHANAAGSVSEPYLQTFSIAVSSTDPLLWLHNQDLYPKFFWSNRKKDDLVAGIGTADVIEYDKTGPNNVSFDILQKELCKKNPGTRYFGGFCFNNEQKQDEQWRAFKSFTFVLPDIQLSVTDGTHTLSCHLMIEPGENSEVRYRRLLETIAKINSSTLRDIPPLPEINSRSFSPDKKQWIKTCNQILQRFQEGLMGKIILARQTLLEFNRGFSPLLFLLRYPFSESSTYRYYFEPEKNTAFFSFTPERLYRRKNNELLTEALAGTCSRETIDNGNGDACQQLLNSEKDIREHKFVKDTIVRELEPICSDIDMEERVRALQLNRLAHLYTQCRAELKPEASNDSAVLKTLHPTPAVGGVPKTKALEQIIQLEPFSRGWYAGPVGWISRNSAEFAVGIRSAVAKENMFYLYSGAGLVRGSNPESEWEEVDQKIADILAITRQKR

SEQ ID NO: 94653 - protein, 487 aa, Prosthecochloris sp.
  misc_feature (1)..(487): tr|A0A1B1Q4E8|A0A1B1Q4E8_9CHLB Isochorismate synthase M enF OS=Prosthecochloris sp. CIB 2401 OX=1868325 GN=menF PE=3 SV=1
MTTYADTTIRAARSPLPLAAATAMIRKSIHEFCSDPGRKSSPGRLITFRTELEPLDTLAWLHNQNTYPRLFWMNRDHTDSVAGIGAADSISCDNNAPNSESFSFLQKTLENKNIAARYFGGCCFNNLQRRDASWAPFTSLYFILPKLQVTSSYGRQELSCHLVLQEGRSLRQSCQDLLDSLDRMQLESSAPDAVIPQPATISYLPNRKEWIERCNDVLQTFSEGFVAKIILARQTSLTFSERFSPLLFMLRYPFPESSTYRYYLEPEEGKAFFSFTPERLYHRHNNSLVTEALAGTCSRERGATDGTTACDHLLNSEKDIREHSFVKNTIADELASICTTIEMENEARALQLNNLVHLYTRCTATLRHDAARDATILETLHPTPAVGGVPKEEALKHIMHLEPFSRGWYAGPVGWISPDKAEFAVGIRSALADGRVVHLFSGAGLVKGSDPSMEWQEVDHKIADMLAMTGCPAYTSGEKSDPSYEAL

SEQ ID NO: 94654 - protein, 487 aa, Prosthecochloris vibrioformis; identical to SEQ ID NO: 94653
  misc_feature (1)..(487): tr|A0A5C4S4A0|A0A5C4S4A0_PROVB Isochorismate synthase M enF OS=Prosthecochloris vibrioformis OX=1098 GN=menF PE =3 SV=1

SEQ ID NO: 94655 - protein, 358 aa, Proteiniphilum sp.
  misc_feature (1)..(358): tr|A0A3M8EDJ5|A0A3M8EDJ5_9BACT Isochorismate synthase O S=Proteiniphilum sp. X52 OX=2382159 GN=D7D25_16480 PE=4 SV=1
MTAPQPSYPILDVLIEQDACFAIFRLPHETAPRFVMQTSGTPSILRDIEELNGQQGFVIAPFRTNATSPLIVLRPDRTTFPEVNISMRKDGQEKAYPQKHISKNKVDYAHLFDRFHKPLANGELKKLVLSRSKIIDRKDTFSAGRSFFNAAEKYPHSYVYLFHTPQSGTWLGSTPEILLRGARDEWHTVALAGTRYPNSGTVTWDDKNLREQHLVTSYLLKQLSSFHITPEINGPYTIKAGKLAHLRTDLSFNLPETPKLGTLLKALHPTPAVSGLPKDEAYRFIQHNEEQDRLYYSGFLGMLDTEAETDIYVNLRCMHIEENSLTLFAGSGLLVSSSLDDEWEETEHKLEVMLNILQ

SEQ ID NO: 94656 - protein, 471 aa, Proteobacteria bacterium
  misc_feature (1)..(471): tr|A0A1Z9GYS5|A0A1Z9GYS5_9PROT Isochorismate synthase M enF OS=Proteobacteria bacterium TMED154 OX=1986844 GN=m enF PE=3 SV=1
MLASPQTLDPKAPSTLSKAIEDLLEQLDQLGKGKLGTSLTGEGIIRLETKASVEDPLSWLHTQKNNKKHFWREREGGETIAGVGECLVFESEHGSTIELMLQRIRRLLNNSSDGVRIFGGIRFNLSSDSISDEWKSWKQARFVIPEIELIRDGKETRLACNLNSVVLDKNRSLEGLRRRISELSEEDSNNILESNFQFLKKNHKPEYENWCDNVNQALSEIKSGTLNKIVLARKTEYQLQEAYDPLKFLLRLRDRAPNAYQYCFQFDKDQAWMGISPERLYKRQSRKIETEAVASTRPRGTNNEEDKNLALELLQSQKEVREHDLVLERIESVLNQFCDKITRKSYREILKLRQVQHLLSRIEGHLNPDHGESTLINAIHPTPAVCGIPDEKARLNIEQLENFDRGWYAGPVGWISKNGAEFAVGIRSAQIHHKTLRIYTGAGIVQGSDPDSEWNEIDAKLRNWESILEPA

SEQ ID NO: 94657 - protein, 443 aa, Proteus hauseri
  misc_feature (1)..(443): tr|A0A410X5J3|A0A410X5J3_PROHU Isochorismate synthase M enF OS=Proteus hauseri OX=183417 GN=menF PE=3 SV=1
MEKVKPVFSTLYEKVKNINLTAQGNLLHLKVALASDVSFSLLSWLAAQTYYPQFYWQHRDEYEEIAACGQLCCFNHIRDAREFLNTHKNESNTDDVRIWGLNAWDTIIPGRIDQQSGDDAYLFLPRIEIRRQQQQLSVHINLLGEKDRDDALTFLSTLNNELEISPLSVSVISVKHSLTQDQWVNYLELALHEIEQGTFEKVVPARATCLTLDNPLKAIQFMKASRDVNHHCYHYMLAFSPSDAFIGSSPERLYYRDEKQLYTEALAGTVASSENEQQARELADWLMNDKKNQHENLVVVDDICQRLQGGIEGIDVSPADVIRLRKVQHLRRYIHGKLIDTDDVDCLKRLQPTAAVCGLPRTVARAFIHQHEPFKRRWYAGSAGYLGLSHAEFAVSLRCGELHDDTLTLYAGAGVVAGSSPLQEWDEIENKAAGLRTLLQEKK

SEQ ID NO: 94658 - protein, 113 aa, Proteus mirabilis
  misc_feature (1)..(113): tr|A0A379GG00|A0A379GG00_PROMI Menaquinone-specific iso chorismate synthase OS=Proteus mirabilis OX=584 GN=menF _3 PE=4 SV=1
MMWIVYSVYNLPRLFGGLPRSIARTFIRQHEPFERRWYAGSAGYLSLPHAEFAVSLRCGELHDDALTLYAGAGVVAGSDPLQEWAEIENKAAGFAHFIRKRVLNSLQFIQWLS

SEQ ID NO: 94659 - protein, 443 aa, Proteus penneri
  misc_feature (1)..(443): tr|A0A379EN45|A0A379EN45_9GAMM Isochorismate synthase M enF OS=Proteus penneri OX=102862 GN=menF PE=3 SV=1
MEKINPVFSTLYEKVKNINLTAQGNLLHLKVTLPSEVSFSLLSWLAAQVYYPQFYWQHRDESEEVAACGQLCCFNHIEDARQFLATHQSDINIDDVRIWGLNAWDTIIPGRIDKIKGDDAYLFLPRIEIRRHQQQLSVHLNMLDEDDKQNTLDFLQTLNQAEEIEPLSVSVTHVNHSLTQEQWTHYLNIALDEINQGLFEKVVPARATCLTLDNPLKAIQFMKASRDVNHHCYHYMLAFSSSDAFMGSTPERLYKRDELMLYTEALAGTVASSDNEQQATQFADWLMNDKKNQHENLVVVDDICQRLQGGVEGIDVSPADVIRLRKVQHLRRYIHGKLIHSDDIDCLKRLQPTAAVCGLPRSVARAFIRQHEPFERRWYAGSAGYLSLPHAEFAVSLRCGELHDDALTLYAGAGVVAGSDPQQEWTEIENKAAGLRTLLEKES

SEQ ID NO: 94660 - protein, 443 aa, Proteus sp.
  misc_feature (1)..(443): tr|A0A3D2BG11|A0A3D2BG11_9GAMM Isochorismate synthase M enF OS=Proteus sp. OX=229037 GN=menF PE=3 SV=1
MEKVKPVFSTLYEKVKNINLTAQGNLLHLKVALASDVSFSLLSWLAAQTYYPQFYWQHRDEYEEIAACGQLCCFNHIRDAREFLSTHKNESNTDDVRIWGLNAWDTIIPGRIDQQSGDDAYLFLPRIEIRRQQQQLSVHINLLGEKDRDDALTFLSTLNNELEISPLSVSVISVKHSLTQDQWVNYLELALHEIEQGTFEKVVPARATCLTLDNPLKAIQFMKASRDVNHHCYHYMLAFSPSDAFIGSSPERLYYRDEKQLYTEALAGTVASSENEQQARELADWLMNDKKNQHENLVVVDDICQRLQGGIEGIDVSPADVIRLRKVQHLRRYIHGKLIDTDDVDCLKRLQPTAAVCGLPRTVARAFIHQHEPFKRRWYAGSAGYLGLSHAEFAVSLRCGELHDDTLTLYAGAGVVAGSSPLQEWDEIENKAAGLRTLLQEKK

SEQ ID NO: 94661 - protein, 443 aa, Proteus vulgaris
  misc_feature (1)..(443): tr|A0A292C8A7|A0A292C8A7_PROVU Isochorismate synthase M enF OS=Proteus vulgaris OX=585 GN=menF PE=3 SV=1
MEKVNPVFSTLYEKVKNINLTAQGNLLHLKVTLPSEVSFSLLSWLAAQSYYPQFYWQHRDEHEEVAACGQLRCFNHIQDACKFLGLHHCDADSDDVRIWGLNAWDTIIPGHIDKIKGDDAYLFLPRIEIRRHQQQLSVHLNMLDEGDKQNTLDFLQTLNQAVEIEPLSVSVTHVNHSLTQEQWTHYLNIALDEISQGLFEKVVPARATCLTLDNPLKAIQFMKASRDVNHHCYHYMLAFSPSDAFMGSTPERLYKRDELMLYTEALAGTVASSDNEQQATEFADWLMNDKKNQHENLVVVDDICQRLQGGVDGIDVSPADVIRLRKVQHLRRYIHGKLIDSDDIDCLKRLQPTAAVCGLPRSVARAFIRKHEPFERRWYAGSAGYLSLPHAEFAVSLRCGELHDDALTLYAGAGVVAGSDPQQEWTEIENKAAGLRTLLEKEN

SEQ ID NO: 94662 - protein, 441 aa, Providencia alcalifaciens
  misc_feature (1)..(441): tr|B6XJ28|B6XJ28_9GAMM Isochorismate synthase MenF OS=P rovidencia alcalifaciens DSM 30120 OX=520999 GN=menF PE =3 SV=1
MTKTKIDKLLTEILNHLSTLVLNPHEYTRLVWQMDTKEVFPGLAWLSAQDSYPQFYWYHRTGSEECSALGTVKSFNSITDAEQFIAEHAEMPDMRLWGLNGWNAVGEGISDALKRESAFYFLPRLEIFRLRSAVTVTLNIDGAEDIPHAMAFLQQLKSTSNTLSILSTEIIGQQHIPDHDEWCERLTGAIQDMRAGKMEKVVMARETILSLTQPITVAEFLSASQKVNHHCYHFMMAFSAHSGFMSSTPERLYLRQGTQLNSEALAGTVANHTDDVIAAENAKWLMEDSKNQHENLVVVDDICQQLQGAVTGIDVSSAKVIRLRKIQHLYRSIAATLLTPSDSDCLQRLQPTAAVCGLPRSVAREFLAQHEPFSRGWYAGTGGFVSLNRSEFAVSLRCAQIDNRQISLYSGAGIVRDSDPEQEWEEIENKAAGLKSLLKTH

SEQ ID NO: 94663 - protein, 445 aa, Providencia heimbachae
  misc_feature (1)..(445): tr|A0A4D7J477|A0A4D7J477_9GAMM Isochorismate synthase M enF OS=Providencia heimbachae OX=333962 GN=menF PE=3 SV =1
MNYKKIDNLITEILNHLSTLTLKSEAHTRIIWQLDGLLSFPSLAWLSEQSCYPQFYWYQRTGAEECSALGMVRSFSSITDAEQFLAQHVETPDIRLWGLNGWNAVGESIAEDIKQQATFCFLPRLEIFRLRSSVTVSINIEGEEDRLNAIAFLQQLKPAVQPSLSLSATIIAQEHIPEHVQWCHLLTNAINEMKAGKMEKVVMARETKLKLSNSISVAEFLSASQQVNHHCYHFMMAFSKNSGFISSTPERLYLRQGEQLNSEALAGTVANHVDDAIAAENAKWLMEDGKNQHENLVVVDDICQQLQGAVTGIDVSSAKVIRLRKIQHLYRSIVATLVSPSDSECLQRLQPTAAVCGLPRAAARDFLAKNEPFSRGWYAGTGGYVSLTKSEFAVSLRCAQIEGDRVSLYSGAGIVSGSDPEQEWEEIENKAAGLKSLFEHNEKPQ

SEQ ID NO: 94664 - protein, 444 aa, Providencia rettgeri
  misc_feature (1)..(444): tr|A0A264VPW6|A0A264VPW6_PRORE Isochorismate synthase M enF OS=Providencia rettgeri OX=587 GN=menF PE=3 SV=1
MNYKKIDQLITEILDHLSTLTLKNQEFIRFVWQLDAQTAFPGLSWLSVQESYPQFYWYQRTGAEECSALGMVKSFDSIDKAQAFLSQYPDIPEMRLWGLNGWNAVGDGIPDEIKRQATFCFLPRIEIHRLRSTINVSINIEGEEDRLNAIHLLQQLKPASQVTLALNADIIAQEHIPTHDEWCRLLNCAIDDMKSGKMEKVVMARKTKLTLSKPIAVAEFLAQSQQVNHHCYHFMMAFNAHSGFISSTPERLYLRQDGQLNSEALAGTVANDPDDAVAAEYAKWLMEDKKNQHENLVVVDDICQQLQGAVTGVDVSSAKVIRLRKIQHLYRSIVATLITPSDSDCLQRLQPTAAVCGLPRKVARQFLAKNEPFSRGWYAGTGGFMSLNKSEFAVSLRCAQIEGAQVSLYSGAGIVSGSDPEQEWIEIENKAAGLKSLFENNEKP

SEQ ID NO: 94665 - protein, 441 aa, Providencia rustigianii
  misc_feature (1)..(441): tr|D1P5K6|D1P5K6_9GAMM Isochorismate synthase OS=Provid encia rustigianii DSM 4541 OX=500637 GN=PROVRUST_07514 PE=4 SV=1
MIYTKIEKLLAEILNHLSTLTLSPNEFTRLTWQFDIQGSFPGLAWLSEQEFYPQFYWYHRTGSDECSALGMVKSFNGITEVEHFLSTHAQWPDMRLWGLNGWNGVGDGISEELKRASTYYFLPRLEIFRLRSNATISLYINGEQDRLNAIEFLQKLKSPSQATLQLSVNIIGQQHIPEREEWCRLLTNAIQDMRAGKMEKVVMARETKLTLSHPISVAQFLSASQQVNHHCYHFMMAFSRDSGFMSSTPERLYLRQDYQLNSEALAGTVANHVDDSIAADNAKWLMEDSKNQHENLVVVDDICQQLQGAVMGIDVSPAKVIRLRKIQHLYRSIVATLLSRSDSDCLQRLQPTAAVCGLPRNIAREYLAKHESFSRGWYAGTGGFVSLNKSEFAVSLRCAQIDGESISLYSGAGIVSDSDPEQEWEEIENKAAGLKSLLGNV

SEQ ID NO: 94666 - protein, 444 aa, Providencia sp.
  misc_feature (1)..(444): tr|A0A4S2YPR5|A0A4S2YPR5_9GAMM Isochorismate synthase M enF OS=Providencia sp. MGF014 OX=2565573 GN=menF PE=3 S V=1
MNYKKIDQLITEILDHLSTLTLKNQEFIRFVWQLDAQTAFPGLSWLSVQESYPQFYWYQRTGAEECSALGMVKSFDSIDKAQAFLSQYPDIPEMRLWGLNGWNAVGDGIPDEIKRQATFCFLPRIEIHRLRSTINVSINIEGEEDRLNAIHLLQQLKPASQVTLALNADITAQEHIPTHDEWCRLLNCAIDDMKSGKMEKVVMARETKLTLSKPIAVAQFLAQSQQVNHHCYHFMMAFNAHSGFISSTPERLYLRQDGQLNSEALAGTVANDPDDAVAAEYAKWLMEDKKNQHENLVVVDDICQQLQGAVTGVDVSSAKVIRLRKIQHLYRSIVATLITPSDSDCLQRLQPTAAVCGLPRKVARQFLAKNEPFSRGWYAGTGGFMSLNKSEFAVSLRCAQIEGAQVSLYSGAGIVSGSDPEQEWIEIENKAAGLKSLFENNEKP

SEQ ID NO: 94667 - protein, 443 aa, Providencia stuartii
  misc_feature (1)..(443): tr|A0A140NFU5|A0A140NFU5_PROSM Isochorismate synthase M enF OS=Providencia stuartii (strain MRSN 2154) OX=11579 51 GN=menF PE=3 SV=1
MVYKKIDNLITEILHQLSTLALGNQEFIRLHWQLDGHSTFPGLAWLSAQSCYPQFYWYQRTGTDECSALGTVYEFNAITEAEQFLSLHAQYPDMRLWGLNGWNAVGEGISLADKQQATFYFLPRLEIFRVRSSISVYLNIKGEDDRLAAIAFLKQLKPAATLPPLNTQIIGHEHFPEKAQWCHLLNKAITKMRAGEMEKVVMARETKLTLSQPVSVAEFLAASQRVNFQCYHFMMALSQETGFLSSTPERLYLRQGTQLNSEALAGTVANHPDDAIAAEKAKWLMEDSKNQHENLVVVDDICQQLQGIVTGIDVSPAKVIRLRKIQHLYRSIAATLVSPSDSECLQRLQPTAAVCGLPRTVARQFLTEHEPFSRRWYAGTGGFVSLNKSEFAVSLRCAQIEHQRLSLFSGAGIVSDSDPEQEWIEIENKAAGLKSLLEPPEKP

SEQ ID NO: 94668 - protein, 405 aa, Pseudaminobacter sp.
  misc_feature (1)..(405): tr|A0A432V7T2|A0A432V7T2_9RHIZ Isochorismate synthase O S=Pseudaminobacter sp. CB3 OX=1851146 GN=EET67_08985 PE =4 SV=1
MRILSSSSQSAGEQRQPASGAEPTFRLRDAERAVVAQGVRAEVEPGAIDSFAERVCTFFAAHADGPRVIVGALPFDRSQADYLFQPETLVRVEGQVETLPAAAAVLEAPRCVIRPEPAPSAYRDAVAACLELIKRSAADVEPLTKVVLSRSLSLSSSHAFDAAGLLRALGQDRSVTVFSTLLPGERSGPQPLLVGATPELLVSKRGANVISHPLAGSARRYSDAAADRRSAAALESSEKDRREHQAVVDAVFDALSPYCRELAAPKGTTLRPTASMWHLGTRIVGTLKDSETPVTELAAVLHPTPAVCGLPRRRAAEVIGELEGYDRGFYAGAVGWTDEQGDGEWYVSIRSARIAGAQATLYAGAGIVAGSDPVAETDETSAKFVALLSALGIDEQGRPLRERAA

SEQ ID NO: 94669 - protein, 503 aa, Pseudanabaena biceps
  misc_feature (1)..(503): tr|L8MSQ4|L8MSQ4_9CYAN Isochorismate synthase OS=Pseuda nabaena biceps PCC 7429 OX=927668 GN=Pse7429DRAFT_4338 PE=4 SV=1
MQVRQSVTYSSIDSKSLHDWIVKAIAKAQIEGSPILFSYSQSWECANPLLLLASKTEVQQPKFYWEQPHANLILAAAGSVAEVSVPNNDRSDRFDCAKKFIKTHLANAILAKDPNLELVQSEISIHVVGAFSFYHNGSNSENWLDLAQANNYPQDSLPETEFPTLLFFIPRWMLRHKDRTCTLTLNHYIQPWDRADEVLERIENMRSHLQESSHYEAPTVHEVSKIVEVQGQQIWTEIVERALTLIHQGHFEKVVLARALDVLADRNFDPFQVLHVLRCEYPECISFLLDYGLGKTFLGATPEVVLQFKSYGDRFWLRSDALAGSIGRGKTVSEDRMLGENLLNSEKDMREHQFVIRSICDRLQSMGAAIDPQVNTGLLRLSNVQHLHTPITAQINDSDWLIALDILQQLHPTAAVGGEPRDRAVCFMQQWEACDRGWYAAPIGWLNGNGEGTFGVGIRAGYIQGDRARIFAGAGIVANSQVENEQSETTIKFAALLKALGAM

SEQ ID NO: 94670 - protein, 602 aa, Pseudanabaena sp.
  misc_feature (1)..(602): tr|K9SEE1|K9SEE1_9CYAN Isochorismate synthase OS=Pseuda nabaena sp. PCC 7367 OX=82654 GN=Pse7367_0213 PE=4 SV=1
MHLELRNADLKTNSPSLQDLIEGAIAKAQNLGRSLILSYSYAWQEVDPLFFLGQKCQAGQYRFYWEQPQQNLAIAAGGMILVLPQVISTAAAEPDLTTEQEHDHDRFRRSREWSRQWLSDAVVGGQPNCQPLKPYIVGGFSFYDRPMHQTWPDFPTARLFVPRWLLRKTANLCTLAINSCICANDQPQQIEAELTDVYNVLKKEVIGNQAQDLTGDRPANLEPPMRLIDRNTASQVTQVELFPAPASNQGTPPAQSVQPVQFNRSGRDQKSRDNSSKFNPAIGSLHQTLAQDQTLAQDQILSQDQILAQNIEQNRRHSPKLLEINEINGDRPWTDAVKQAVGEIKAGKLDKVVLTRALELRVADQFEPNLVLDSLRQSYPECINFAINFGGQATFLGATPELLLQFEHEEEQLQLKSGAVAGSTGRSNSPDQDQEMGDRLLRSSKDLSEHRIVVKSICDRLGHLGAELEPIRSPQLLKLSNVQHLHTPIAAKLNVDDWFVAFDILGQLHPTAAVGGEPRQVAIEVMQSLEKCDRGWYAAPIGWVNGDGEGAFAVGIRSGYLDGNQARLYAGAGIVADSKFDAELGETKIKFDALFKALGIEN

SEQ ID NO: 94671 - protein, 389 aa, Pseudarcicella sp.
  misc_feature (1)..(389): tr|A0A2S2DSK9|A0A2S2DSK9_9BACT Isochorismate synthase O S=Pseudarcicella sp. HME7025 OX=2183547 GN=entC PE=4 SV =1
MVILILNMPNTLPQTLTSLLDWEQLWQHTQQKRGGMAVWRLPKSDKRYFLVDSTGGEKLGSLDLETFPAGFLVAPFIGLPYFLKAETLLEESIVQEEVVGSSLLKPLHNVEENEEKHQHFTHWVSESINEIQSGHFQKVVLSRTDEVEFPGDFSTLKAFGQLCQAYPNAFVCALYIPELGSTWLCATPETLVEQNAQGIFRTIALAGTQSAIDPLGEIILPQNARWSQKEIEEQAYVCRYIIECFKKIRLREYQEIGPKTILAGNLLHLKTEFTVDTQALNFSQLPGILLSLLHPTSAVCGTPKEEAIAWIAKAEKHARELYSGYLGPVNLGDEIHLFVNLRTVKVDQSEGKCRATYFAGCGITEDSDPEKEWQETVMKCQTLQRVLEN

SEQ ID NO: 94672 - protein, 470 aa, Pseudarthrobacter phenanthrenivorans
  misc_feature (1)..(470): tr|A0A3B0G0E7|A0A3B0G0E7_9MICC Isochorismate synthase O S=Pseudarthrobacter phenanthrenivorans OX=361575 GN=D7Z 96_06270 PE=4 SV=1
MTSTFRTLTVPLDGQKFAGGLPSFLVRDDVLCWTRREAGLAGFGEIARFTATGPERFLEADIWWRHLVLEAEVDDAVELPGTGPVAFGSFAFSKTSAHESRLIVPEIVVGVRDGQVWLTQLTFDDGPLTEEGALAALDRWLGGGSTAAPDADRPGGSTTAAADAAGNGTPGAGPGKAGGAVVRPLPLAAGATLHTGSLSEEAWMAAVDAGVAEIRTGALEKLVLARDVVATVPSGVHAATVLRELAARYRECWTYGVDGLVGATPEMLIQVEGRTAQARVLAGTLDRRDAHGEDGLPMDYATRVLAGSEKQRHEHEIAIQSLTTQLAPFSEAMNAHDEPFILELPNVWHLASDVKAELTEVEGHVPTCLALINALHPTAAVCGTPTQVAGALIRKLEHLDRGPYAGPVGWLDAAGNGEWGIALRGAVIESPTSVRLYAGCGIVDGSQPEAELAETWAKFRPMLESLGISN

SEQ ID NO: 94673 - protein, 463 aa, Pseudarthrobacter sp.
  misc_feature (1)..(463): tr|A0A5C4IT10|A0A5C4IT10_9MICC Isochorismate synthase O S=Pseudarthrobacter sp. NamE5 OX=2576839 GN=FDW84_08140 PE=4 SV=1
MTSTLRTLTVPLDGEKFPGGLPAFLVRDDVLCWTRRESGLAGFGQIARFTASGPERFLEADIWWRHLVLEAEITDAIELPGTGPVAFGSFAFSKTSAHESRLIVPEIVVGVRDNQAWLTQLALNDGLLTEEGAHAALARWLGMSFTSAESTTAAADSAGDPGQGTVPAKAGGAVVRPLPLAAGATLHTGSLSEEAWMEAVAAGVAKIRTGALEKLVLARDVVASIPTGVHAATVLRELAARYRECWTYGVDGLVGATPEMLIQVEGRTAQARVLAGTLDRRDAHGEDGLPMDYATRVLAGSEKQRHEHEIAIQSLTSQLAPFSEAMNAHDEPFILELPNVWHLASDVKAELTEVEGHVPTCLALINALHPTAAVCGTPTQVAGALIRKLEHLDRGPYAGPVGWLDAAGNGEWGIALRGAVIEAPDTVRLYAGCGIVDGSQPETELAETWAKFRPMLESLGISS

SEQ ID NO: 94674 - protein, 401 aa, Pseudoalteromonas luteoviolacea
  misc_feature (1)..(401): tr|A0A541BJB3|A0A541BJB3_9GAMM Isochorismate synthase O S=Pseudoalteromonas luteoviolacea OX=43657 GN=FLM44_156 80 PE=4 SV=1
MHAGEISNLAQAQSLGEFLLDQDCLFVSGNSCLLGHGIKHRFNIPIANTEYLVEELQSQLRAHQGDSDNAIAFGVLPFCKHQNAQFIIPKTVARWDKNVFSQWLNAQVTELDATNNSLQAVRYLQDRTHFEQTVKDAKSLFDSNQLEKIVLSKQVDLEFSKPLNRKHVLNQLLQQSQSGYHFAFPTQNDAVLMGVSPELLLRKQDQTVTSNPLAGSIPRDRCEKVEAQRRSVLFSSKKDRYEHAVVIDDMRQLLEPVCDNLQIPAEPDLLSTATMWHLSTVISGHLKDPQTHILDLANQLHPTPALCGKPTKPAYQHILDLEGHDRGLFSGIIGWCDQHGNGEWVVVIRCGELKAQVARLFAGAGIVAASDPNSEWLETEAKLKTMLNALSVQQAYSSFNK

SEQ ID NO: 94675 - protein, 406 aa, Pseudoalteromonas piscicida
  misc_feature (1)..(406): tr|A0A3B6XXP3|A0A3B6XXP3_PSEO7 Isochorismate synthase O S=Pseudoalteromonas piscicida OX=43662 GN=D0N37_00700 P E=4 SV=1
MLSEISALQSTNTTLESIDLSQQAFFVSGTRCLVTQRPHHRFTTQIKDHDVLVSQLKRELAKCSSNDAIAFGMLPFCKTQQAQFIVTEQAHQYDKETFKQWLNAKGTLKQDTMPSLERISHRQSQHHYESAIREAKKLFANEQLEKIVLGKQVDLYFDAPLSPETILTNLLTQSPSGFHFSFPTEQNSTLMGVSPELLLRKHGQAVLSNPLAGSAKRSNDKATEFKLKQALMASKKDRYEHAVVLVEMSQVLQPWCQKLTIPSSPSLLSTATMWHLSTEVEGQLADANTHVLALANRLHPTPALCGKPTADAYPWIHSLEGESRDFFSGIVGWCDKHGNGEWVVVIRSGEISANHARLFAGAGIVAASDPTAEWLETEAKLSTMLNALESNQTYHQLSQIKMRATA

SEQ ID NO: 94676 - protein, 406 aa, Pseudoalteromonas sp.
  misc_feature (1)..(406): tr|A0A4Q6Z351|A0A4Q6Z351_9GAMM Isochorismate synthase O S=Pseudoalteromonas sp. CO342X OX=1777270 GN=EXT47_0056 0 PE=4 SV=1
MLSEISALQSTNTTLESIDLSQQAFFVSGTRCFLTQRPHHRFTTQIKDHDVLVSQLKRELAKCSSNDAIAFGVLPFCKTQQAQFIVTEQAHQYDKETFKQWITAKGTLKQDTMPSLERISHRQSQHHYESAIREAKKLFANEQLEKIVLGKQVDLYFDAPLSPETILTNLLTQSPSGFHFSFPTEQNSTLMGVSPELLLRKHGQAVLSNPLAGSAKRSNDKAMEFKLKQALMASKKDRYEHAVVLVEMSQVLQPWCQKLTIPSSPSLLSTATMWHLSTEVEGQLADANTHVLALANRLHPTPALCGKPTADAYPWIHSLEGESRDFFSGIVGWCDKHGNGEWVVVIRSGEISANHARLFAGAGIVAASDPTAEWLETEAKLSTMLNALESNQAYHQLSQIKMRATA

SEQ ID NO: 94677 - protein, 430 aa, Pseudocitrobacter faecalis
  misc_feature (1)..(430): tr|A0A366FCG9|A0A366FCG9_9ENTR Isochorismate synthase M enF OS=Pseudocitrobacter faecalis OX=1398493 GN=menF PE =3 SV=1
MLSVSAALKSLADSLSDDFPASPGTRIIEVPFPLNDAFDPLCWLNAQTVWPQFWWQQRSGDDELAALGAAVSFSSLAQAEDFLTRYDADDARICGLNSFDYRQIALFLPRLEWRREGGRASLRVNLASETSLHADAVAAKAFITQLSSQSVCHTSALTLESELHRPGEAGWRGLIEQATLAIANGEFEKVVLARATDLTFTTPPDAGALMAASRRVNLHCYHFFMAFDAGQAFFGSSPERLWRRRGLELETEALAGTVASHPDPTQAQHLADWLMNDDKNQRENMLVVDDICARLQKHVDALDILPAEIVRLRKVQHIRRVIQATLKEASDDRCFMQLQPTAAVSGLPRTQACDFIDCFEPFSREWYAGSAGYISRCQSEFCVTLRSAKVSGNTVRLYAGAGIVAGSQADSEWQEIENKAAGLRSLLFSE

SEQ ID NO: 94678 - protein, 391 aa, Pseudocitrobacter sp.
  misc_feature (1)..(391): tr|A0A5B0K3Y9|A0A5B0K3Y9_9ENTR Isochorismate synthase E ntC OS=Pseudocitrobacter sp. 73 OX=2605731 GN=entC PE=4 SV=1
METSLAVDTNEQQETLCADNFFFMSPYRSFTATGCFSRFSCPAAGGDALNSPFQQQLAAAFAEAKAAGIEKPVMVGAIPFDTNQPSSLFIPKQWQSFSRTGKQHSARYIASASPVGVTERHEIPQQPVFMEMVARAAALTDTPQVDKVVLSRLIEIATDRPLDSGVLLERLVAQNPASFNFHVPLENGGVLLGASPELLLRKEGSHFSSLPLAGSARRQPDDVLDREAGNKLLASEKDRHEHELVTQAMKATLAPRSRSLSLPETPQLITTPTLWHLATPIEGEANPVENALSLACLLHPTPALSGFPHLAAKQIIAELEPFERDLFGGIVGWCDAEGNGEWVVTIRCAEVNANTVRLFAGAGIVPASSPEAEWRETGVKLSTMLNVFGLQ

SEQ ID NO: 94679 - protein, 466 aa, Pseudogracilibacillus auburnensis
  misc_feature (1)..(466): tr|A0A2V3VHX8|A0A2V3VHX8_9BACI Isochorismate synthase M enF OS=Pseudogracilibacillus auburnensis OX=1494959 GN= menF PE=3 SV=1
MIELEEKTLQSFLYKAIDEAISLRKQPLFSWTKKIDKVDLIDVFQAAKNTKKDRLFWTNSSNDFALVGVGCTHKVIGHEDRFEQLQKEWKNILQEAIIHDHFKEVGTGLVALGGMSFDPKREKSGLWAKYPTSQLTIPAYMVVKNNSNYYLTMNRYLTNKDNIEQIIHEVNTMEKILLTETEHHHSTQKVIAKKEIAPNTWKKTVQKAVDEIKQNRAKKIVLAREMRLKLNKDANIAGMLKKLINTQPNSYIFAFEQDDNCFLGATPERLVQVQGDKLLSTCLAGTAPRGKTKEEDATIARSLLFDQKNREEHDYVVQMIKQNIEKYCEAIDIPKEPVIYPLRNLQHLYTPVTAKLKPSYTVFDIIKKLHPTPALGGVPREKALAFIREEERLDRGWYGAPIGWLDSNKNSEFAVAIRSGLIQKDEVSLFAGCGVMRDSDPEMEYDETNVKFLPMLHIMEANDESY

SEQ ID NO: 94680 - protein, 476 aa, Pseudomonas aeruginosa
  misc_feature (1)..(476): sp|Q51508|PCHA_PSEAE Salicylate biosynthesis isochorism ate synthase OS=Pseudomonas aeruginosa (strain ATCC 156 92 / DSM 22644 / CIP 104116 / JCM 14847 / LMG 12228 / 1 C / PRS 101 / PAO1) OX=208964 GN=pchA PE=1 SV=1
MSRLAPLSQCLHALRGTFERAIGQAQALDRPVLVAASFEIDPLDPLQVFGAWDDRQTPCLYWEQPELAFFAWGCALELQGHGEQRFARIEENWQLLCADAVVEGPLAPRLCGGFRFDPRGPREEHWQAFADASLMLAGITVLREGERYRVLCQHLAKPGEDALALAAYHCSALLRLRQPARRRPSGPTAGAQGDASAQERRQWEAKVSDAVSSVRQGRFGKVVLARTQARPLGDIEPWQVIEHLRLQHADAQLFACRRGNACFLGASPERLVRIRAGEALTHALAGTIARGGDAQEDARLGQALLDSAKDRHEHQLVVEAIRTALEPFSEVLEIPDAPGLKRLARVQHLNTPIRARLADAGGILRLLQALHPTPAVGGYPRSAALDYIRQHEGMDRGWYAAPLGWLDGEGNGDFLVALRSALLTPGRGYLFAGCGLVGDSEPAHEYRETCLKLSAMREALSAIGGLDEVPLQRGVA

SEQ ID NO: 94681 - protein, 469 aa, Pseudomonas amygdali
  misc_feature (1)..(469): tr|F3IC62|F3IC62_PSEAV Salicylate biosynthesis isochori smate synthase OS=Pseudomonas amygdali pv. lachrymans s tr. M302278 OX=629267 GN=PLA106_01325 PE=4 SV=1
MNPLPSFSDLQGCLTGGLMECLHSARAQVSTARPRVLASFSTPSPHVEPFGLFTANREQVQPACLWHVQAQGQYRLGLGLAHEFNAGPADSWQTLENRWRDMAATAVVRGDHRPTLFGGFAFDRRQPRTRLWRDFPDAALTLPRFELHESDGQTRLIVNVLIDEHSQCAALAEALAGEWAEILARPLPGAPASGDQFVRLSMAHLWKQDVFHAVNRIKRGGLEKVVLARSQNVAAASPLEQVMQRLMHKQPNAYLFAFARGSSCFMGASPECLLTVRGDQLHTMALAGTAPRGANSADDARLGEQLLLSEKDNSEHAMVIDCIRHGLAEHCLTLDIACRPRLHKLPHIQHLLTPVQATLAPNASLLGIAQSLHPTPAVGGLPRNEALDYIRSHEQLDRGWYAGPIGWLDDQGNGELAVALRSALLNGHRATLFAGCGLVSGSEPESEYRESDLKMQTMREALSGNGLPG

SEQ ID NO: 94682 - protein, 465 aa, Pseudomonas chlororaphis
  misc_feature (1)..(465): tr|A0A0D5XZS4|A0A0D5XZS4_9PSED Isochorismate synthase O S=Pseudomonas chlororaphis OX=587753 GN=PCL1606_27810 P E=4 SV=1
MSAFSQLAEHAPGLTRVFEQARQRAAGQGAPVLASYALAIGALDLLELFCKADQPHAESLFWRAADGGRSLFGWGVAAQLDGVGEQRFATVDRQWQHWLRSAVIHGPQPPAICGGFRFDPQVAPSETWQGFGDGSMLLMTLLLIRDGEQCWLVCQQRIAASDDPAGRCEHVLEQWNALMDRYLSPAASTAAPRHTGDHCLPRAAWEDKVAHALHVLRDSALNKVVLARQVRSEFSHAVNPGRTLARLAGNDPAAYLFAFRRQRACFIGASPERLAKLHDGHLQTLALAGTCRRDADPQRDAELARELLDCAKNRHEHAVVVQIIQSDLAPWVEHLQVPPTPAIQRLSRVQHLSTVIEGRLRPRASLLQVVATLHPTPAVGGHERQQAMAHIRQFEGFDRGWYAAPLGWLDARGNGEFIVGLRSALLDDRQACLFAGCGIVQCSDPASEYEETCIKLAGMQVALQA

SEQ ID NO: 94683 - protein, 389 aa, Pseudomonas entomophila
  misc_feature (1)..(389): tr|Q1IAK9|Q1IAK9_PSEE4 Isochorismate synthetase OS=Pseu domonas entomophila (strain L48) OX=384676 GN=pmsC PE=4 SV=1
MRASTLMTTGMDEEQVADRSMAFSFTSGDRELVVNGALQRIDTPAVGGEDADSLLQKTLAHAFDQARRAGQANPLVVGAIPFDPSEPSCLYIARESHWRAREATAAGGELPTLVEQKPIPEEDAFKRSVEHAIVNFRHSDVRKAVLSVQRELVFADAVDVDVLQRNLRAQNPSGYHFRVPLADGATLLGVSPELLVRKEGANFISNPLAGSARRMADPEADKRNADWLVASEKDHYEHGFVTQDIAARVGELCTRLDVPQRPSLISTPALWHLSTRIEGNLIDPQVTALQLACRLHPTPAVCGFPTERARRLIRFVEPAERGQFTGMVGWCDAEGNGEWVVTIRCGTVKHNRVRLFAGAGIVEASQPAAEWAEVQTKLGTMLRACGLAH

SEQ ID NO: 94684 - protein, 475 aa, Pseudomonas fluorescens
  misc_feature (1)..(475): tr|A0A0D0TAI9|A0A0D0TAI9_PSEFL PchA protein OS=Pseudomo nas fluorescens OX=294 GN=pchA PE=4 SV=1
MNAADLLTVFQAAHQRAVAYQRPVIAVSAHPAPTLAPLALYAAHRQGFLWCAHSPDLSLFGLGCAWQIEACGPGRMAEVDRQWFALCADALVQGPYPPLLLGGMRFDEQQPCASHWAPFADASFHLAHWLLSEDATGRWLRCQRVVEASSDPAALVHESVAAYEQLLNPAPHVTSTPDVLERRALPRHQWQAKVETALHAIARGELNKVVLARHIDHHLDATLDTGAVMGRLHARRNASHLFAIHRGEHCFMGATPERLLSCDAGRLTTHALAGSTRRGLWPDEDQALGERLLADPKEQHEHRLVVQTITQALHDKVTDLHAAPCPGLLKLATVQHLSTPITAQLNVGKRLLDGVQALHPTPAVGGLPRAPALGFIREHEGFDRGWYAAPVGWLDANGNGDFLVALRSALITPRHCHAFAGCGIVEGSLPANEYEETQIKLASMQQALQLACPADTDVAYSQTRDETPYASTAQR

SEQ ID NO: 94685 - protein, 472 aa, Pseudomonas fuscovaginae
  misc_feature (1)..(472): tr|A0A0N1J5L9|A0A0N1J5L9_9PSED Isochorismate synthase O S=Pseudomonas fuscovaginae OX=50340 GN=PF66_05929 PE=4 SV=1
MSPFIDRTALLDCLEQARQRATDQQRPVLACFSCRWPACDGLRAFAAAWGFTQAVLWQFAESGPAMVGVGRALELGLQQDQSLVELQQAWQRWMAEAVIVGPQRPRLFGGRTFDRENPCSEQWRAFTEAAFVLPRLSRQGEHLLLASQIDEQTDCQALCQELLDDLYYWWETEQGRPVTTLQPGRNPRVRESLPAEEWKARVKRALADIESRQLHKVVLAREVRIQADTPFSLPRILQALAQGNPGAYLFAFRRGDSCFLGATPERLVLQQAGQLRTTALAGSIPRGTCAQSDRANHDRLLASAKDRHEHALVVETLRSDLRRFTAELQVPEVPVVHRLKHIQHLMTPIHGRLLPEVPLLAVVEALHPTPAVGGLDRQAAIRWIRRHESLHRGWYAAPVGWLDSEGDGEFAVALRSALVRGEQAWAFAGCGLVAGSEPELEYRETCVKLRTMLDALAPGLSENLVEASRLQA

SEQ ID NO: 94686 - protein, 472 aa, Pseudomonas orientalis
  misc_feature (1)..(472): tr|A0A3G7X4K9|A0A3G7X4K9_9PSED Isochorismate synthase O S=Pseudomonas orientalis OX=76758 GN=C4J97_4304 PE=4 SV =1
MNTLKQSSYANPYPNLNAHELGAALLPVLERRFPQLAGEFMGLFSQHTDGVRTSMVGLGSEFRVVVTHDGTHLTLQLQHEQAVCLAQTLALDASRLFHEQLFDAVARFVEQLCPWLMQKHGLPACATFLGGWRCATHPEHLSEPLVFTLPRLFCRISDEQLTFSCLHDDIWYAIDDRLIASAADFTPTANPRIIKREDIPACADYVDDLVGLLNELACTDADKVVIGREVKLTLERPISPALLLRLVAPRPNPHYEFVFRWADQVAWVGISPETLLRKENDLLVVEPLAGTRKGSSEGEKNARYRHELTSDLKELEEHETAAGLFLEQLATVCENGSLDLRESRSVIDLGYVQHLKSLISGTVKAGLNVFDALAAVYPPATIWGKPLAVCGERIRRYEQIDRGFFTGGLGYFTLGDDANFALAIRTVKLTESHIHVYAGSGIVKASDPYREWLETSNKMKPYLANEYVWNIS

SEQ ID NO: 94687 - protein, 526 aa, Pseudomonas protegens
  misc_feature (1)..(526): tr|A0A2C9EP50|A0A2C9EP50_PSEPH Salicylate biosynthesis isochorismate synthase PchA OS=Pseudomonas protegens (s train DSM 19095 / LMG 27888 / CHA0) OX=1124983 GN=pchA PE=4 SV=1
MRRCSRNVGNGPSRRAWTRCSWCRCLPRSSTGTLPSKCATGAVSTGWIKEPKMSESCLSGLTRALRKGESLARRRGRAVLVVYSLAAERLEPLRLFAANRQVFGQSLFWSSDQGALALAGFGCTEEISPPAAERFAASTQAWRQLLLQAHQVGPKRAYLCGGFAFDPQGPRSAQWQSFAATSLVLPRILLLREGEQQHWLFSLWVEPGADVAQCAGALEAEWALLQARYTHAPLAQMPVGTQAEDDTQAAGRWQDCVARAIARIQGGELSKVVLAREVCLRASRSIPCGPLLENLRAAYPQAFLFAFSRGDSCFLGATPERLVRLARGTLNTVALAGTCARGQHEQQDAELGQALMDSAKDRHEHALVVQTLREALQPYCAMLEIPPQPQLHRLAHVQHLLTPVLGRLRPQVDLLQVVDALHPTPAVGGLPRGKALGYIREHEQLDRGWYAAPVGWLNAEGDGEFAVALRSALIRGNQAHLFAGCGIVGESDPASEYQETCLKLRTIGEALRPQPAATYEKLGLSL

SEQ ID NO: 94688 - protein, 464 aa, Pseudomonas savastanoi
  misc_feature (1)..(464): tr|Q48HP7|Q48HP7_PSE14 Isochorismate synthase OS=Pseudo monas savastanoi pv. phaseolicola (strain 1448A / Race 6) OX=264730 GN=pchA PE=4 SV=1
MSRLPSFSGLQTCLQAAQAQVSAHHPWILASFSTPSLQVEPLGLFTANREQVQPACLWCVQAQGRYRIGLGLAHEFNAGPADSWQTLEKRWRNMAVTAVVHGEHRPTLFGGFAFDRQQSSTRLWRDFPDAALTLPRFELRESDGRPQLIVNVLIDQHSQCDQLAGKLVDEWVEILGRPVPSESMASDRFVRLSMAHLWKQDVFNAVNRIKRGGLKKVVLARSQNIPVVNPLQQVMQHLMLRQPNAYLFAFARGNSCFLGASPECLLTVQGDQLHTMALAGTAPRGTNSAEDARLGEQLLASEKDNSEHAMVIDCIRHGLVEHCLKLDIACRPRLHKLPHIQHLLTPVQATLAPNASLLGIVQSLHPTPAVGGLPRNEALDYIRSNEQLDRGWYAGPIGWLDDQGNGELAVALRSALLTGQRATLFAGCGLVSGSEPESEYRESDLKMQTMREALGQLPHNAAWM

SEQ ID NO: 94689 - protein, 471 aa, Pseudomonas sp.
  misc_feature (1)..(471): tr|A0A3G7APD8|A0A3G7APD8_9PSED Menaquinone-specific iso chorismate synthase OS=Pseudomonas sp. CMR12a OX=658629 GN=C4K39_5481 PE=4 SV=1
MNEACLPGLTRALQDAEAQARREGRAVLVVFSQAAERLDPLRLFASNRQVFGQSLFWSGDQGALAMAGFGCTEEISPPAAERFAASTQAWRQLLERAHQVGPRKAYLCGGFSFDPEAVRGALWQSFADTSLVLPRILLLREGDQQHWLFSLWIEAEADVDQCAAAIAAEWNLLQARYAHGPRLQVPACSQPQDLDSGAQQWQATVAGAIERINAGALNKVVLAREVCLQAERNIPCGALLENLKAAYPQAFLFAFSRGDSCFLGATPERLVRVARGTLNTVALAGTCARGVHEQQDAELGQRLLDSPKDRYEHALVVQTLREALQPFCAMLEIAPQPQLHRLAHVQHLLTPVLGRLRPQVELLQLVQVLHPTPAVGGLPRASALEYIREHEQLDRGWYAAPVGWLNAEGDGEFAVALRSALIRGNQAHLFAGCGIVAESDPQSEYRETCLKLRTIGEALRPTSSTPGMQAG

SEQ ID NO: 94690 - protein, 336 aa, Pseudomonas stutzeri
  misc_feature (1)..(336): tr|A0A4P9E393|A0A4P9E393_PSEST Isochorismate synthase O S=Pseudomonas stutzeri OX=316 GN=FEV13_02740 PE=4 SV=1
MQQAFDDARRAGLSTPAVVGVIPFDKAQPSRLFVPRHLAFLPPSAPPTAICGLPCGAARSCIEQPGRAGFHDAVNQALDLLREGRIDKAVLSRLLQLEFDEPPCAQTIFQGLRQQNPEAYHFAVDLPGEGVLIGASPELLLRKQGRAFSTNPLAGSARRSPDPLADEEAARALLDSAKDQHEHRLVIEDLERQLRPLCRTLNVPPTPALLKTARLWHLSTRIDGELYDELSALRLACQLHPTPALCGFPTAAAKQVIAELEPFDRGVFGGIVGWCDAAGNGEWAVVIRCGIIQQTRVRLFAGAGLVSASCPEAEWRETGTKLGTMLAAFGLDKEAV

SEQ ID NO: 94691 - protein, 475 aa, Pseudomonas synxantha
  misc_feature (1)..(475): tr|I4KTI9|I4KTI9_9PSED Isochorismate synthase, PchA fam ily OS=Pseudomonas synxantha BG33R OX=96901 GN=PseBG33_ 2337 PE=4 SV=1
MNAADLLKTFQAAHQRAVAYQRPVIAVSAYPAPTLAPLALYEAHRQGFFWCAHSPDLSLFGLGCAWQIEASGPQRMAEVDRQWFALCADALVDGPHPPLLLGGMRFDEQQPCASHWAPFADASFHLAHWLLSEDSHGRWLRCQRVVEPGSDPAALAQASLAAHEKLLNPATHVAPAPHVVERVALPRDQWQAKVDTALHVIARGDLSKVVLARHIDHHLDAALDTGAVMGRLHARRNASHLFAIHRGEHCFMGATPERLLSCEAGRLTTHALAGSTRRGCKPNEDQALGKRLLADPKEQHEHRLVVQTITQALGDKVSDLHAAPHPNLLKLATVQHLSTPITARLNAGKRLLDGIQALHPTPAVGGLPRAPALDFIREHEGFDRGWYAAPVGWLDAEGNGDFLVALRSALITPRHCHAFAGCGIVEGSLPANEYEETQIKLANMQQALQLACPADTDVAYSQTRGETPYASTAQR

SEQ ID NO: 94692 - protein, 261 aa, Pseudomonas syringae
  misc_feature (1)..(261): tr|S6TV41|S6TV41_PSESF Salicylate biosynthesis isochori smate synthase (Fragment) OS=Pseudomonas syringae pv. a ctinidiae ICMP 18807 OX=1194404 GN=A244_20521 PE=4 SV=1
RGDHRPTLFGGFAFDRRQPRTRLWRDFPDAALTLPRFELHESDGQTRLIVNVLIDEHSQCDPLAEALAGEWAEILARPLPGAPATGDQFVRLSMAHLWKQDVFHAVNRIKRGGLEKVVLARSQNVAAASPLEQVMQRLMRKQPNAYLFAFARGSSCFMGASPECLLTVRGDQLHTMALAGTAPRGVNSADDARLGEQLLLSEKDNSEHAMVIDCIRHGLAEHCLALDIACRPQLHKLPHIQHLLTPVQATLAPNASLLGIA

SEQ ID NO: 94693 - protein, 465 aa, Pseudomonas veronii
  misc_feature (1)..(465): tr|A0A1D3JY50|A0A1D3JY50_9PSED Salicylate biosynthesis isochorismate synthase OS=Pseudomonas veronii 1YdBTEX2 OX=1295141 GN=pchA PE=4 SV=1
MRAFAQLHAHAEEMTEVFEHAQRRAVEQGEPVLASYSMRIAPLDLLALFGSVDQPGAECLFWRAPEDDKSLFGWGVAAELSSAGPQRFASVDAQWRHWLQSAVIHGPLAPSVCGGFRFDHQVKASPAWQGFGDASLWLMTLLLVRDGADCWLVCQQRVAPSDAARCCCEHVLKEWNTLMDRYVSGAPSTAARQHTRDQSLPRACWESKVAHALDVLRDTALNKVVLAREVVSEFSRPISAGRTLAALAINDPTAYLFAFRRHHACFIGASPERLVKLHDGHLQTLALAGTARRDPCPEQDAQLAQTLLDCQKNQHEHAVVVQIIQRDLAPWVRPLHVPPAPHIKRLSRVQHLATLIEGALRPQSSLLDMVAVLHPTPAVGGHERGQALEHIRQFEGFDRGWYAAPLGWLDAQGNGEFIVGLRSALLNGNQARLFAGCGIVEHSDPASEYDETCIKLAGMRAALQV

SEQ ID NO: 94694 - protein, 465 aa, Pseudomonas wadenswilerensis
  misc_feature (1)..(465): tr|A0A380SYL8|A0A380SYL8_9PSED Salicylate biosynthesis isochorismate synthase OS=Pseudomonas wadenswilerensis OX=1785161 GN=pchA PE=4 SV=1
MRAFTRLEEHTAGLTQVFEQARQRAAVQGAPVLASYALAIVELDLLELFCRVDQPDAESLFWRAADGGKSLFGWGVAAELSGAGGQRFAMVEQQWQQWLHSAVIHGPQPPALCGGFRFDHQVEASSAWQGFGDASMLLMTLLLIRDGDQCWLVCQQRIGPSDNADSRCEHVLNEWNGLMDRYLSPPVTLAPPQHTRDQCLPRACWESKIAHALDVLRDSPMKKVVLAREVISEYSHAISPGRTLVRLASNDPSAYLFAFRRQQSCFLGASPERLVKLHDGRLQTQALAGTIRRDPDPQQDAQLAQALMDCEKNRHEHALVVQIIQSGLAPWASQLQVPSTPAIQRLSRVQHLSTLIEGRLRPQAGLLQVVATLHPTPAVGGHERRQAMEHIRRFEGFDRGWYAAPLGWLDARGNGEFIVGLRSALVNGKHARLFAGCGIVHCSEPASEYEETCIKLAGMQLALQA

SEQ ID NO: 94695 - protein, 336 aa, Pseudomonas zhaodongensis
  misc_feature (1)..(336): tr|A0A3M2HNA2|A0A3M2HNA2_9PSED Isochorismate synthase O S=Pseudomonas zhaodongensis OX=1176257 GN=EA797_15225 P E=4 SV=1
MQRAFADAQAAGLANPVLVGVIPFDKRQPSSLFIPRHVSHLSPTSPPTAICGFPCGSARKCIEHPNQAGFQQAVNRALGALRNGRLDKAVLSRLLQLEFDVPPCPATIFQGLRQQNPEAYHFYADLPEGGVLIGASPELLLRKIGQRLETNPLAGSARRHADPLADDDAAQRLLDSAKDQHEHRLVIRDMERQLRPLCHELHIPETPSLMATAKLWHLSTRIEGELAEPISALNLACQLHPTPALCGFPTAAARQLIAELEPFDRGVFGGIVGWCDAAGNGEWAVVIRCGVIDQHKVRLFAGAGLVSASCPESEWRETGTKLRTMLAAFGLDREVA

SEQ ID NO: 94696 - protein, 415 aa, Pseudonocardia autotrophica
  misc_feature (1)..(415): tr|A0A1Y2N9U4|A0A1Y2N9U4_PSEAH Salicylate biosynthesis isochorismate synthase OS=Pseudonocardia autotrophica O X=2074 GN=pchA PE=4 SV=1
MTVAPATTALRVRTRPLRLDGPLLDTLPGDSGELCWVRGDEGLVGWGEVARFTGSGPDRFAEADRWWSSVVDGLDDHTDDVRLPGTGAVAFASFTFTDDSPGSVLVVPRVVVGRRGNRAWITEITPADAPFAATALRPPSPVRPGGRLRYADGDVPAHRYRVAVAEAVRRMRAGELAKAVLAHDLLAHADAPLDARFLLHGLARRYPTCWSFAVDGLVGATPELLLRRAGQIVESRVLAGTMWPSGSGDDVGAALYGSAKDRREHAYAVDSLAATLRPLVAELTVPETPAVLTLPNVSHLASDVRARLDPARPASLLTLIGAVHPTAAVGGTPTPDATALISEIEGLDRGRYAGPVGYLDADGGGEMGIALRCAELQGRTARLFAGCGIVADSDPDAEVREAAAKMRAVRDALEG

SEQ ID NO: 94697 - protein, 401 aa, Pseudonocardia dioxanivorans
  misc_feature (1)..(401): tr|F4CYY0|F4CYY0_PSEUX Isochorismate synthase OS=Pseudo nocardia dioxanivorans (strain ATCC 55486 / DSM 44775 / JCM 13855 / CB1190) OX=675635 GN=Psed_5577 PE=4 SV=1
MDDPGRLLDLLPDDRPLSWVREGEGLVGWGEVARFTGTGSGRFAEADAWWRSFTARLDVRDEVGVPGTGAVAFASFTFADRSPGSVLVVPRVVVGRRDGRTWITEFAGDGVRTAMRQAVPVRVGGALRYDDGDMTVADYRGAVAEAVRRMRAGQPQKAVLAHDLLAVADQPLDARFLLAGLAHHYPTCWAYSVDGLVGATPELLLRREGEVVSSRVLAGTIWPGDDPAGAGTDIGAALLASAKDQREHAFAVDSLAATLRPHCRTLDVPSEPSILALHNVSHLSSDVRGVLRDGASLLTLVADVHPTAAVGGTPRTEALQVIAELERMDRGRYAGPVGWIDAAGDGELGIALRCAQLDGNTARLFAGCGIVADSDPDSEVREAAAKLVAVREALEGTLVGG

SEQ ID NO: 94698 - protein, 418 aa, Pseudonocardia sp.
  misc_feature (1)..(418): tr|A0A1Q8LBC1|A0A1Q8LBC1_9PSEU Menaquinone-specific iso chorismate synthase OS=Pseudonocardia sp. Ae706_Ps2 OX= 1885035 GN=Ae706Ps2_4515c PE=4 SV=1
MTVAPASTALRVRTRPLRLDGRLLDALPADAGALSWVRDGEGVVGWGEVARFTASGPERFAEADRWWRRVVDRLDAGAGYDDVRLPGTGALAFASFTFADGCPGSVLVVPRVIVGRRGHRAWITEITTADAPETPGRLPVPSPVRPSGRLRYADGQVSAHRYRAAVASAVGRMRDGELEKVVLAHDLLAVADRPLDPRFLLRGLARRYPTCWSYAVDGLVGATPELLLRLRGRTVESRVLAGTMWPGSGPDADTAGALIGSSKDRREHTYAVDSLAESLRPLVAELHVPDAPTVLTLPNVSHLSSDVHARLDPSRPASLLTLVGAVHPTAAVGGTPTPDATALISEIEGLDRGRYAGPVGWVDAEGTGEMGIALRCAELQGRTARLFAGCGIVADSDPDGEVREAAAKMRAVRESLEG

SEQ ID NO: 94699 - protein, 396 aa, Pseudonocardiaceae bacterium
  misc_feature (1)..(396): tr|A0A431NP82|A0A431NP82_9PSEU Isochorismate synthase O S=Pseudonocardiaceae bacterium OX=1873463 GN=EKK42_0194 5 PE=4 SV=1
MDDVGRLLDLLPDDRPLSWVRDGEGLVGWGEVARFTGTGAGRFAEADAWWRSFTARLDVRDDLQLPGTGAVAFASFTFADRSPGSVLVVPRVVVGRRDGHTWITEFAGDGVPAAMRRAMPVRAGGALHYDDGDMTVARYRRAVAEAVARMQAGELDKAALAHDLLAVADEPLDPRFLLAGLAHHYPTCWAYCVDGLVGATPELLLRREGDTVSSRVLAGTIWPGNGGDDIGAQLMASGKDQREHAFAVDSLAATLRPHCATLDVPAEPSILALHNVSHLSSDVRGTLRDGSSLLTLAADVHPTAAVGGTPRAAALRVISELERMDRGRYAGPVGWVDAAGDGELGIALRCAQLDGNTARLFAGCGIVADSDPDTEVREAAAKLVAVREALEGSVTG

SEQ ID NO: 94700 - protein, 383 aa, Pseudooceanicola marinus
  misc_feature (1)..(383): tr|A0A1X7A9N7|A0A1X7A9N7_9RHOB Isochorismate synthase E ntC OS=Pseudooceanicola marinus OX=396013 GN=entC PE=4 SV=1
MPINDMQRDACKRASDAGLPFALWRDPFGRSFTALISTTQPENEPVFGDQTAPGFVMAPFDTEDGSQAWTLPADVVISDDGPLYRDGIALVDHPVSTAQRRITDPAHTPPSALRTPDGESPDPTDRETYMERVSRAVARIRAGDCDKIVLSRIDPRTLPEDRDLLDLAEGLAELHPHAFVCLVSSGPTGTWLTATPEILLANDENGIRTMALAGTQWPEPETDIASLTWPQKIIDEQALVADYIREAFAAEGFEDVDETAPYTVRAANLCHLRSDFSAPAGSQEALGRLLGRLHPTSAVCGMPKEAARAFIMEEEGPTRRFYTGYLGPRGLNGGTQLYVNLRSASISGNQIFLHVGGGIVEASDPAMEWQETVEKTKTISAVL

SEQ ID NO: 94701 - protein, 478 aa, Pseudopropionibacterium propionicum
  misc_feature (1)..(478): tr|A0A448N0X6|A0A448N0X6_9ACTN Isochorismate synthase d hbC OS=Pseudopropionibacterium propionicum OX=1750 GN=d hbC PE=4 SV=1
MGWDTLLTNHPEMPRKSRLTRDDALFFNNVKRSLFATIRLDVPISTIDPSGLREPASAIVPRVSLDFATKRLRATTVAIDDPGDLAHFLTPERATAFLRRGEGFVTLGEVARFETDSPDAADVWWSEVSAHIDHDSELPGAWGTGPLAVGSFAFDPDRSRVRSVLIVPETIIGRRSGQAWMTRISEGRLSLDLPAMGEPVAPPENVRLTPDGLSGPDWVDIVAEAVERIRAHEISKVVLARSLRAVTDGPIDPRHVLRRLLRAYPMAWNYLVDGMVGATPELLVRRDRTLITSRVLAGTVSLDPGHTDPLRRAEQLAGSGKDIAEHEFAVASVAEALEPYCAAMNVPEAPSVLTLPNVMHLATDITGVVEPDISSLALAGALHPSAAVCGTPTFFAGEVIAELESMDRGRYAGPVGWVDSDGDGEWAIALRGGFVNPAHPEEIRLFAGAGIVADSDPQAELAETEAKFKPMLQALGLA

SEQ ID NO: 94702 - protein, 410 aa, Pseudopuniceibacterium sediminis
  misc_feature (1)..(410): tr|A0A399IYW7|A0A399IYW7_9RHOB Isochorismate synthase O S=Pseudopuniceibacterium sediminis OX=2211117 GN=DL237_ 13145 PE=4 SV=1
MTPSRHRVAPSPAPVDLSARTAPFLFQGPDGAIGATGTLHPLPRGPLATLPDRISRAMEGMAPTGLIGGALPFDRDADDCLWMADQTSRTPIAARTQPEIAPTWTVTPEPSAEAYAEAVQQALDLMKNQANLPQPLRKIVLARTLALVCDQVIPVPSVLARLCQDASVTAFQVALPPSTDTGPDTVTDTATDTDGARLLVGASPELLVRKSGAQILSHPLAGSARRRSDAAQDRAAAQALTASAKDLREHAIVVEFILDTLAPHCTTLTAPSVPEITSSATMWHLGTPIRGELRDADMPSVQIAGLLHPTPAVCGSPRDRAAQIIQQLEPVARDFYAGAVGWTAANGDGAWYVSIRCAEIQGRSARLYAGAGIVPGSVPAQEAAETGAKFAALLRALGLPHDMAIPTDPH

SEQ ID NO: 94703 - protein, 345 aa, Pseudozobellia sp.
  misc_feature (1)..(345): tr|A0A3B0CA08|A0A3B0CA08_9FLAO Isochorismate synthase O S=Pseudozobellia sp. CCMM003 OX=2419782 GN=D7Z94_11090 PE=4 SV=1
MSLALMDKVSAQFRDRLPFVVYRKPNHTQVTALFQKDDTLHSVSDFTETGFVMAAFEWKPTVLLRPDEKHEADFDFGTPPNCKSGTEIQIDLEQKKVHLDLVQKGIAAIQQGDLKKVVLSRKIEMDFNENPLELFQSLLPTYPNAFCYLWFHPNTGLWLGATPEILLQVRNREFNTISLAGTLPYSGNDQVVWGRKELKEQDLVTDYILDVLRDKASDIKKGELESVKAGNLLHLRTKISGVFLEDGLGSVIRFLHPTPAICGFPKQPALDFIHDNENYDREFYTGFLGELNFDAETKLYVNLRCAQIKENKVVVYTGGGITQDSDPEKEWDETVAKSKTLLQLI

SEQ ID NO: 94704 - protein, 453 aa, Psychrobacillus lasiicapitis
  misc_feature (1)..(453): tr|A0A544T9A5|A0A544T9A5_9BACI Isochorismate synthase O S=Psychrobacillus lasiicapitis OX=1636719 GN=FG382_1059 0 PE=4 SV=1
MPKTTGQKQTTLRFYTETIEVSRLSAHAFFEAGDEKYKGQRFFWQNKEKTLTLVGLGHAHTISNNLADNRYADINSKWKELCNASVKEQVDVSPILFGGFAFDPKNTITSEWDNFPSAFFVVATFQLVIQQDRTFVSIHYITNEEESADIFERLRVERDALIHTAQVKELQTHSKPALVKREDRLKEQYLHAVEDVTKRIREDEVNKVVIARSLKLMFDQDFSPATAIYHAAMEQPESYLFGLENGDQMFFGATPERLVKVENSKAQSAGLAGSVKRGKNSVEDKALGEALLADPKNLGEHKYVVDMIRKVFAQYCKELKVPARPKLMKIRDIQHLYTPIEGHLKKDSSLFALVQALHPTPALGGEPRQEAISIIRESEQMNRGYYAAPIGWINTEGDGEFAVGIRSALIENEYAYLYAGGGIVAESSSMEEFEETRVKFRPMLRTLGGNMND

SEQ ID NO: 94705 - protein, 460 aa, Psychrobacillus soli
  misc_feature (1)..(460): tr|A0A544TB47|A0A544TB47_9BACI Isochorismate synthase O S=Psychrobacillus soli OX=1543965 GN=FG383_10920 PE=4 S V=1
MNTEVILMPKTTGQKQTTLRFYTETIEVSRLSAHAFFEAGDEKYKGKRFFWQNKEKTLTLVGLGHAHTISNRLEDNRYADIDAKWKELCSASLKEQVDVSPILFGGFAFDPKNKIASEWDNFPSAFFVVATFQLVIQHDQAFVSIHYITNEEESADVFERLRIERDALIHTAQVKELQVHAKPVLVNREDKGKEQYLHAVEDVTKRIRAEEVEKVVIARSLKLTFDEDFSKATAIYHAAMEQPESYLFGLENGDQMFFGATPERLVKVENEKVQSAGLAGSVRRGKNSVEDKALGDALLADPKNLGEHKYVVEMIRKVFTQYCKDLKVPARPKLMKVRDIQHLYTPIEGHLKKDSSLFALVQALHPTPALGGEPRQDAINIIRESEQMNRGYYAAPIGWINTEGDGEFAVGIRSALIENEHAYLYAGGGIVAESSSIEEFEETRVKFRPMLRTLGGNMND

SEQ ID NO: 94706 - protein, 453 aa, Psychrobacillus sp.
  misc_feature (1)..(453): tr|A0A5J6PUE4|A0A5J6PUE4_9BACI Isochorismate synthase O S=Psychrobacillus sp. AK 1817 OX=2303505 GN=D0S48_19100 PE=4 SV=1
MPNTTGQNKTTLRFYTETIEVSRMSAHAFFEAGEDCYKGKRFFWQNKEKTFTLVGLGHAYVLANDLEKNRYQDIAQKWEELCACSLIEKADVSPILFGGFSFDPANKISSEWNSFPSSFFAVATFQLVIRDDQAFVSIHLITEEQDSSAAFEHLRIERDTLIHTAQVKELKVHEKPQLLQREDRLKDEYLSAVEAVTNRIRNKEVNKVVIGRSLKLTFENSFSSSTAIYNASMEQPESYLFGLEKEDKIFFGATPERLVKLEKGKVESAGLAGSVRRGTNLEEDKKLGDALLADNKNLMEHQYVVSMIRKVFDQYCEQVKIPSRPKLMKIRDIQHLFTPIEGKIKGSSSLFEFVEAMHPTPALGGEPRQEAIEIIRESEQMNRGYYAAPIGWVNAEGEGEFAVGIRSALIENQYAYLYAGGGLVSESTSLEEFEETRVKFRPMLRTLGGNMND

SEQ ID NO: 94707 - protein, 432 aa, Psychromonas ingrahamii
  misc_feature (1)..(432): tr|A1SRV3|A1SRV3_PSYIN Isochorismate synthase MenF OS=P sychromonas ingrahamii (strain 37) OX=357804 GN=menF PE =3 SV=1
MLTAEHNFNLMVIFIREQLQQFAIKQGDKPSCNLVIPLTPFDLLGLLKGQSLDSDALYPRIYWEDIEHLQTIACFGAIDECTYIPEPIGEACYFGGLAFQQQGVQWADFPEILFIRPALEFTLEQQKLRLTCHFNGANSIEKSLLLINCLQKPVSPDAVNNIVVSREDLPNRQQWAELVESAIEYKALIPKVVLSRQTELICEQKVNQWDLINQWQEANPNSFHFAFQFSTNHTFIGCSPERLFSRENNRLKTEALAGTVNRGREPREDAILRQSLLSDKKIDRENYLVQEFIVSSLKRLKAEVTCSEPHVMQLLNVQHLRVEINAKLNAQTKDAHLLHNLHPTPAVGGCPKLPALQFINDKEHYNRGWYAGTVGYLRVDKSDFSVAIRSALVSSNKIKLFAGAGIVVGSIADQEWQELENKIHTILDILSV

SEQ ID NO: 94708 - protein, 422 aa, Psychromonas sp.
  misc_feature (1)..(422): tr|A0A2N0WZB5|A0A2N0WZB5_9GAMM Isochorismate synthase M enF OS=Psychromonas sp. psych-6C06 OX=2058089 GN=menF P E=3 SV=1
MIEKISDKLRQLRQRVGEYPTKNLNITLEPLSLLAFLKAQKEITPAIFWQDKAHQRRVVCLGAIDDINHIPEINDEARYYGGLAFQQQGKQWQNFPAVRFIRPALEFSEENSVLTLICHFDGNTSIETTLLLLATLRPSAPLNNISTQITSRNDSPNQQHWAELVDLAIEYKALLPKVVLSRQTELICETQLDYCDLLAQWHEANPNSFLFSFKFAKDNVFIGCSPERLFERSDNKLQTEALAGTVNRGRNEREDNILLQSLLTDKKIDRENYLVQEFIIANLKRLKAQVSCEEPHVLQLHNVQHLCVPIHAQLPPETSDAELLYRLHPTPAVGGSPKLPALQFINDNEPYLRGWYAGAVGHLSANHSDFSVAIRSALLTEKRIKLFAGAGIVTGSIAEQEWQELDNKIHTILDIITLKGEQ

SEQ ID NO: 94709 - protein, 392 aa, Puniceibacterium sp.
  misc_feature (1)..(392): tr|A0A0J5QDJ1|A0A0J5QDJ1_9RHOB Isochorismate synthase O S=Puniceibacterium sp. IMCC21224 OX=1618204 GN=IMCC2122 4_111853 PE=4 SV=1
MAQHEDILRLGEGRVQGAVQDNRALLRVGGISGFGRRGGAIAAHAAELAKAATGLFARSDAPPVVLGALPFDPGAPGFLIAPEEVHIVDAAAEDRPAAVAEPLQGTDLTFRESPSREAYAAHVAEALVAIAAGDLDKVVLARALDVEGGEAFDIATLVGRLASDSSTVPYCLPLPGSNATLVGASPELLVSRTGRNVLSHPLAGSARRRRDAVADRAAAAALNGSLKDRHEHALVAEHVRDILAPFCRQLTPEIAPTLSATPAMWHLGSRIEGELKDAHTPVLDLVAALHPTPAVCGSPTAAAASAISRLEPVPRGYYAGAVGWSDAQGDGAWHVAIRCAVVQGASARLFAGAGVVAGSDPAAEAEETAAKFGTLLAALGLSPRLLLQGRTG

SEQ ID NO: 94710 - protein, 475 aa, Puniceicoccaceae bacterium
  misc_feature (1)..(475): tr|A0A368B733|A0A368B733_9BACT Isochorismate synthase O S=Puniceicoccaceae bacterium OX=2026784 GN=DBX01_06795 PE=4 SV=1
MQIIPSSMLPERDEGALRQFLEGCRDTARAKDHFQIASISLAVKHIAPLAVLQSIYEPEEVHCYIERAADDEAVAAAEAVVQERFDGVERFALVKAFAEEILENTIAVGDLSEAFTGPHFFTAFSFDDSVPEGAAFPAATVFLPRWQVSRSKGKYGAVANLKIEADTDIDSLVMRVWGAYRKFGAFDYLPDEVKEPSPQPKIESRRELASELYPNAVECALEAIEEGNYEKIVLARGIELLADRPWQPLDTLNRLRERFAGCFTFSFSGDTASSFIGATPERLLQIRHGRLLTEAIAGSAPRGQTASEDAKHARALLESGKDLREHTCVRDSILRRLEKVGVRGKAESNPQLLLLANVQHLRTRIEAEVGDAVHLLDILPEMHPTPAVGGSPREAALLCIADLEQIDRGLYAGVVGWFNHLNEGEMVVGIRSALIEGKQACLYAGAGIVEGSDPDKEMRETEMKLRALLDVLSSS

SEQ ID NO: 94711 - protein, 407 aa, Pusillimonas ginsengisoli
  misc_feature (1)..(407): tr|A0A4U5LLM8|A0A4U5LLM8_9BURK Isochorismate synthase O S=Pusillimonas ginsengisoli OX=453575 GN=D7I39_00035 PE =4 SV=1
MPTETGTPVPHNTAATQQSLPARGWMLDDFARGDVFFASPTTQWRSQASKGALSAMEPVSVSVVQSLFDEARQRGLTEPVLFGLVPFDTSKAASLTIPLAYERADVPDSNTATHSAASGQTAKPHILGRTPVPAPEAYGDMVRKALTLFAEGDLKKVVLSRAMDIELDQPPNYPQLLQDLLRRNAHGYTFALPIWGDGGTSLASGVMVGASPELLVRREGDRIFVNPLAGSIGRNSDPDTDAALKAGLARSEKDLREHAYVVNDIERILREYCDELDVPSGPSVIGTDTLWHLSTFITGQLRDPAVTALQLSCALHPTPAICGQPTDKAFEHIHHLEPFDREYFAGLVGWQRANGDGEWALTLRCAMHTEPTRLRVYAGAGTVAGSDPESEIAETATKMETFIRALG

SEQ ID NO: 94712 - protein, 407 aa, Pusillimonas sp.
  misc_feature (1)..(407): tr|A0A5A9XAZ4|A0A5A9XAZ4_9BURK Isochorismate synthase O S=Pusillimonas sp. ANT_WB101 OX=2597356 GN=FQ179_16795 PE=4 SV=1
MPTESGASEPHNTATTEPSLPARGWMLDDFARGDVFFASPATQWRSKASLGALSAIEPVSVSVIQSLFDEARQRGLTDPVMFGLVPFDTSKPASLTIPLSYECAGVPDNDTVMRSLDSDHTAKPQIVGRTPVPPPEIYGDMVRKALTLFAEGDLKKVVLSRAMDIDLDQPPNYPQLLQDLLRRNAHGYTFALPIWGDGGTSLASGVMVGASPELLVRREGDRIFINPLAGSIGRNSNPDTDAALKAGLARSEKDLREHAYVVNDIVRILHEYCDELDVPPGPSVIGTDTLWHLSTFITGQLRDPAVTALQLSCALHPTPAICGQPTGKAFEHIRQLEPFDREYFAGLVGWQRANGDGEWALTLRCAMHTEPTRLRVYAGAGTVAGSDPDSEIAETATKMETFIRALG

SEQ ID NO: 94713 - protein, 456 aa, Quadrisphaera sp.
  misc_feature (1)..(456): tr|A0A5C8ZKS4|A0A5C8ZKS4_9ACTN Isochorismate synthase O S=Quadrisphaera sp. DD2A OX=2593304 GN=FMM08_00330 PE=4 SV=1
MTTTVGRSSRPPQPRSLEPGSPGAVRARLRWRTTRVSDPGPLLDVLTRRSPSSSPLAWVRREEGLVGWGEAARVEAGGEHRFATAAAAWRDLVLGAPVVDDVHLPGTGPVAFTSLSFDAASAGGGVLVVPEVLVGRRGDVVWVTTAEPVDAPVGAVGSVAQTAVAAGDPVEPVSGPGAVRYADGALCGPRWATAVARAVARIQAGELEKVVLARDLVAEAEHEVDPRWLLARLAEAYPSCWSFSVDGLVGATPELLVRRERGLVHSRVLAGTIRRTGDEERDASLAGSLARSGKDLEEHEYAVRSVVSALAPHCRTTTAPDAPFVLHLPNVMHLASDVTGVLDDARPGGAPGVLELAAALHPTAAVCGTPTSAAAALIAELEGMDRDRYAGPVGWVDGSGDGEVGLALRCARIDPDDARRVRLFAGCGVVAGSDPMAELAESDAKLVPVRDALGGA

SEQ ID NO: 94714 - protein, 471 aa, Quasibacillus thermotolerans
  misc_feature (1)..(471): tr|A0A0F5IA81|A0A0F5IA81_9BACI Isochorismate synthase M enF OS=Quasibacillus thermotolerans OX=1221996 GN=menF PE=3 SV=1
MSTIKSEPIKAAFTKLVRQKPMNKQPALFSYVEKVDWIDPLLFYKNGASVYKGERFFWKDRDGQVEMVGLGNIYTLRSEEGDEARYEEVEKKWNNMIKCAVVHNPYTALGTGPALFGGFSFDPNRPQAEEWAKFSSAFFYLPEYMLTVYEGNCYITINILCRPEELHSLIDHLESRKDEVLTHTDTTALELPASLLKKEEYHQAQWIKGVNEAVERMEADTELKKVVLARKIVASFDQAVSHDGVLERLIAQQPDSFIFSLEAMDSCFLGASPERLVRKRGEKVLSTCLAGSIKRSKNPEEDEALGKELLNDEKNRKEHDYVVQMIKEEMEGLCKHVSIPSAPELMKVRDIQHLHTPVVGLTEAACSILQFVEKLHPTPALGGLPNDKALPIIRQLEGMDRGLYGAPVGWVDSQGNGEFAVAIRSGLLEKEKAFLYAGCGIVADSDPDSELAETQIKFRPMLRALGGSSDE

SEQ ID NO: 94715 - protein, 445 aa, Rahnella aquatilis
  misc_feature (1)..(445): tr|H2IP50|H2IP50_RAHAC Isochorismate synthase MenF OS=R ahnella aquatilis (strain ATCC 33071 / DSM 4594 / JCM 1 683 / NBRC 105701 / NCIMB 13365 / CIP 78.65) OX=745277 GN=menF PE=3 SV=1
MKQISAIIEQLDTRLAGEWPATAGIRQFSYSLQKQPDTGLLEWLAAQPCYPKFYWQQRDGNEEAAVCGDAYSFGNTAQAQAFIRQFPDVPDLHIWGLNAFNGAEDGTSTHNALFLPRIELCRQGNTWWLRCTIFSPHSLRAEARRTRLFLRSLVASRALPPIASRVLQHQHLPAQSQWKPLIDRALSGIEQHQFDKVVLARKTTLTLSQPLNACAFLAASRNVNHHCYHFMLAFTPHQAFLGSSPERLFLRDNTELYTEALAGTVANHPDDQEAQTLGDWLLSDGKNQRENLLVVDDICQRLQGGAHSLDVTPAEILRLRKVQHLRRNIHGELTEPDDAGCLQRLQPTAAVAGLPRQAARAFIAEFEPFDREWYAGSAGYLSAEQSEFTVALRSAAVKGHHLELYAGAGIVAGSDAAQEWQEIENKAAGLRTLLEEHYAPAVQAG

SEQ ID NO: 94716 - protein, 406 aa, Rahnella inusitata
  misc_feature (1)..(406): tr|A0A419M8G8|A0A419M8G8_9GAMM Isochorismate synthase O S=Rahnella inusitata OX=58169 GN=D5396_13105 PE=4 SV=1
MDAVVTDGKSNGAGLVGEQCPEVAKNIADISPASGFFFTSPFRSLATQGCFTQLTLPAAGGEALNGEFQQAIAQAFIQARNAGIAHPIVCGAIPFDTQQPSALFVPKEVQWFDRQQFLDNAPVSQNALPQVKRKTEHPAQTEFMQMVSSAVEATERGALRKVVLSRLLKIETRQPVDRAALMARMIEQNPGGYHFHVPLAQGALLGASPELLLRKLGNHFHSNPLAGSAKRSADLRKDHAASQALLVSGKDAYEHHIVTDAMRDVLTPRCSHLHIPSRPELLSTPTLWHLASPIDGDVADSAENALSLACLLHPTPALCGMPTTSARELISRLEPFERGLFGGIVGWCDAQGNGEWVVTIRCGTVEANRVQLFAGAGIVPDSVPESEWAETGTKLNTMLRAFGLAS

SEQ ID NO: 94717 - protein, 445 aa, Rahnella sp.
  misc_feature (1)..(445): tr|A0A2N0W5D0|A0A2N0W5D0_9GAMM Isochorismate synthase M enF OS=Rahnella sp. AA OX=2057180 GN=menF PE=3 SV=1
MKQISAIIEQLDTALTGEWPDAAGIRQFSYSLQKQPDTGLLEWLSSQPCYPKFYWQQREGNEEAAVCGDAYAFGNIRLAQAFIRQHHDVPDLHVWGLNAFNGADGSALAANALFLPRIELCRQGTTYFLRCTVFSTTSLRDEMRRTRLFLRSLVVSHALPPITSRVLQHQHLPAEPQWNQMIARALAGIEQQQFEKVVLARKTTLTLSQPLNACAFLAASREVNHHCYHFMLAFTPQQAFLGSSPERLFLRDHFELYTEALAGTVASHPDNHEAQALGEWLLNDGKNQRENLLVVDDICQRLQGGAHSLDVMPAEILRLRKVQHLRRSIHGELTESDDAGCLQRLQPTAAVAGLPRQAAREFIAEFEPFDRQWYAGSAGYLSTEQSEFTVALRSAAVKGNQLELYAGAGIVAGSDAAQEWQEIENKAAGLRTLLEEHYTPAVQAG

SEQ ID NO: 94718 - protein, 445 aa, Rahnella woolbedingensis
  misc_feature (1)..(445): tr|A0A419NBG5|A0A419NBG5_9GAMM Isochorismate synthase M enF OS=Rahnella woolbedingensis OX=1510574 GN=menF PE=3 SV=1
MKQISAIIEQLDATLAGEWPDTAGIRQFSYSLQKQPDTGLLEWLSAQPCYPKFYWQQRDGNEEAAVCGDAYAFGDTAQAQAFIREHQDVPDLHIWGLNAFNGADNSAFAANALFLPRIELCRQGTRYWLRCTLFSPRSLREEARRTRLFLRSLVASQALPPIASRVLQHQHLPAQPQWNQLITRALNCIEEQQFDKVVLARKTTLTLSQPLNACAFLAASRAVNHHCYHFMLAFTPQQAFLGSSPERLFLRSHDELYTEALAGTVANDPDDDKAQDLGNWLLNDGKNQRENLLVVDDICQRLQGGAQSLDIMPAEILRLRKVQHLRRSIHGELTESDDAGCLQRLQPTAAVAGLPRQAAREFIAEYEPFDREWYAGSAGYISAEQTEFTVALRSAAVKGHHLELYAGAGIVAGSDAAQEWQEIENKAAGLRTLLEEHYTPAVQAG

SEQ ID NO: 94719 - protein, 431 aa, Raoultella electrica
  misc_feature (1)..(431): tr|A0A514ENR8|A0A514ENR8_9ENTR Isochorismate synthase M enF OS=Raoultella electrica OX=1259973 GN=menF PE=3 SV= 1
MLSVSTALERLRDCLSDDFPPSSGTRIFDIPFPLHDAFDPLLWCGHQAQWPQFYWQQRNGDEELAALGAVKIFPSLAEAHGFLQRQGLADLRICGLNAFNPQEGTLFLPRLEWRRVGGKATLRLLLSSETSLREEASAAREFLQALTPEQAQPAALPPVLSEQHSPDYPQWYALIEQATQAIAAGEMDKVVLARATDVRFALPPDPLAIVAASRRSNHRCFHFMMAFNAQRTFFGSTPERLWRRRGTLLRTEALAGTVASHPDDRQAQLLADWLMKDDKNQRENMLVVEDICQRLQDDVRSLDVLPPQVVRLRKVQHLRRCIWAELYRPDDTRCLHQLQPTAAVAGLPRRAALAFITRHEPFIREWYAGSAGYLALAQSEFCVALRSALVENATLRLYAGAGIVSGSDPEQEWQEIENKAAGLRSLLLTKA

SEQ ID NO: 94720 - protein, 431 aa, Raoultella ornithinolytica
  misc_feature (1)..(431): tr|A0A4S3RN99|A0A4S3RN99_RAOOR Isochorismate synthase M enF OS=Raoultella ornithinolytica OX=54291 GN=menF PE=3 SV=1
MLSVSTALERLRDCLSDDFPPSSGTRIFDIPFPLHDAFDPLLWCGHQAQWPQFYWLQRNGDEELAALGAVKTFPSLAGAHDFLQRQGLADLRICGLNAFNPQEGRLFLPRLEWRRVGGKATLRLLLNSETSLREDAIAARAFLQALTPDQAQPAALPPVLSEQHSPDYPQWHALIEQATQAIAAGEMDKVVLARATDVQFAAPPDPLAIVAASRRSNHRCFHFMMAFNAQRTFFGSTPERLWRRRGTLLRTEALAGTVASHPDDRQAQLLADWLMKDDKNQRENMLVVEDICQRMQDEVRSLDVLPPQVVRLRKVQHLRRCIWAELSQPDDTHCLHQLQPTAAVAGLPRRAALAFITRHEPFTREWYAGSAGYLSLAQSEFCVALRSAQVENATLRLYAGAGIVSGSDPEQEWQEIENKAAGLRSLLLTKT

SEQ ID NO: 94721 - protein, 391 aa, Raoultella planticola
  misc_feature (1)..(391): tr|A0A2X2E5W5|A0A2X2E5W5_RAOPL Isochorismate synthase E ntC OS=Raoultella planticola OX=575 GN=entC PE=4 SV=1
METSLAEDVQEQKMTLLPESFFFMSPYRSFRTAGCFSRFSHSAADGALLDGEFQRNMAAAFTDAKAAGIRKPVMVGAIPFDTNQPSELFIPESWENFSRTGKQQSARYFTAQTPMDVVERQEIPQQDAFMAMVERAAGLTATPEVDKVVLSRLIDITTRERVDSGALLERLIAQNPASFNFHVPLSDGGVLLGASPELLLRKEGDHFSSLPLAGSARRQPDDVLDREAGNKLLASGKDRHEHELVTQAMKAVLTPRCRELSLPDSPQLVTTPTLWHLATPIEGTALAQENAMSLACLLHPTPALSGFPHQVAKRLIAELEPFDRQLFGGIVGWCDDEGNGEWVVTIRCARLHQRTLRLFAGAGIVPASSPLGEWRETGVKLTTMLNVFGLN

SEQ ID NO: 94722 - protein, 391 aa, Raoultella sp.
  misc_feature (1)..(391): tr|A0A509CNI3|A0A509CNI3_9ENTR Isochorismate synthase O S=Raoultella sp. NCTC 9189 OX=2583577 GN=entC PE=4 SV=1
METSMAEDVREQKMTLAPESFFFMSPYRSFSTSGCFRRFSHSAAGGDALSGEFQQKMAAAFQEAKAAGIRKPVMVGAIPFDTRQPSELFIPERWETFSRTGKQRSARYASGQAAMDVVARQEIPEQDAFMAMVERASALTATAEVDKVVLSRLIDITTRDRVDSGALLERLIAQNPASFNFHVPLSDGGVLLGASPELLLRKEGDSFSSLPLAGSARRQPDDVLDREAGNKLLASGKDRHEHELVTQAMKAVLAPRCRELSLPDSPQLITTPTLWHLATPIAGTAAAGENAMSLACLLHPTPALSGFPHQAATRLIRELEPFDRQLFGGIVGWCDDEGNGEWVVTIRCARLQQNTLRLFAGAGIVPASSPLGEWRETGVKLTTMLNVFGLY

SEQ ID NO: 94723 - protein, 48 aa, Raoultella terrigena
  misc_feature (1)..(48): tr|A0A3P8JPW7|A0A3P8JPW7_RAOTE Isochorismate synthase e ntC OS=Raoultella terrigena OX=577 GN=entC_1 PE=4 SV=1
MTIRCARLQQNTLRLFAGAGIVPASSPLGEWRETGVKLTTMLNVFGLY

SEQ ID NO: 94724 - protein, 372 aa, Rathayibacter tanaceti
  misc_feature (1)..(372): tr|A0A166I2V3|A0A166I2V3_9MICO Isochorismate synthase O S=Rathayibacter tanaceti OX=1671680 GN=dhbC PE=4 SV=1
MSGRGETLRLEFSGPGRLREAAETWRALAASATVDDPLGLPGTGLVAFGAFTFSSDSRATSVLIVPRTIVGSRDGRSWLTRIAPVGSSLPDLPVEQALGQEYRVALEPGAMSPEAYRAAVASAVATVRAGHLEKVVLARDLTGRLPRDADLRRVLGTLASGYPDCWTFAVDGFVGASPETLVAVDRGIVSARVLAGTSARGADAADDAAAASALLASAKDRSEHAFALASLLHELHPHTRELSAGAEPFTLRLPNLWHLATDVRGLLGDASTALDLVGALHPTAAVAGTPTTEALALLKRLEPFDRGRYAGPVGWIDGHGDGEWAVGLRSAEVSPDGTITAWAGAGIVADSDPDSELAETGMKLRPMLDALG

SEQ ID NO: 94725 - protein, 473 aa, Reinekea forsetii
  misc_feature (1)..(473): tr|A0A2K8KL90|A0A2K8KL90_9GAMM Isochorismate synthase M enF OS=Reinekea forsetii OX=1336806 GN=menF PE=3 SV=1
MSEQYLESGRPQLRPKPALTNGPKNAFQRAVHQLTSRLAQLTPSLNQLIHISIDIPAIDLLGWLADNPHPEQSYWQNRDSQFALAGLDRALVIEATEFSQVDRVMADIKTALEQASSIGTGAVFLGGIGFDSGMTGPWQAFKAVSFQAPLCFVQQRHGQFELGFNLYSATRSSWHQQTKRLTQLLAGLCFDTPPKPVAKNAIVHRQDSLSLAAWRDRVAQTLSAIANGQIQKAVLARRVDLRLAHAANLPDLLSRWRDLNPASFSFLLSQSGTRFLGCSPERLFVRRHQRLDTEAIAGTLPRGRNRADDLFYGRQLLTDPKLRREHRLVSDFIGQQLAPFCTEIDTEHKAHVLKLSAIQHLCQPIQANLQPGVANHQLVQALHPTPAVCGYPRQAAKDLIDRLEPVERGWYSGAVGVVSDAGAEFAVAIRSALCRDNRLFCYSGVGIVDGSVAEQEWYELESKLQTLLELIEQ

SEQ ID NO: 94726 - protein, 445 aa, Renibacterium salmoninarum
  misc_feature (1)..(445): tr|A9WRT2|A9WRT2_RENSM Isochorismate synthase OS=Reniba cterium salmoninarum (strain ATCC 33209 / DSM 20767 / J CM 11484 / NBRC 15589 / NCIMB 2235) OX=288705 GN=RSal33 209_2639 PE=4 SV=1
MNKANQQQSCRAGTLGFVLRSLTVPLADVSSSNPPSGLLAGLLTQDSLCWVRRDEGLVGIGTVAEFTVRGHNRFDEAKTWWAELTGNAEIENPVGIAGSGPAAFGSFTFSKLSKQDSTLRLPRLVVGLRDGVAWLTINSTQAEVTEQMAHEELARWRESITPSEAPGGSFEIATGALSEPEWTEVVAEGIRAIKERSLEKVVLARDIVVRGSRPIDRPTVLSQLMNQYRECWTYEVGNFIGATPEMLIKVEAGVARARVLAGTVDRAGAPNSSSYAQEMLMESAKQRQEHEIAIKSLIGQLAPFSIDLHFPAEPFILELPNVWHLASDVSAELAASNHHLPSSLALVEALHPTAAVCGTPRLEAGALIRELENFDRGPYAGPVGWLDAAGNGEWGIGLRGAVLENEYEARLYAGCGIVEASDPEAELAENWAKFRPMLQALGAQK

SEQ ID NO: 94727 - protein, 417 aa, Rheinheimera sp.
  misc_feature (1)..(417): tr|A0A437QIX3|A0A437QIX3_9GAMM Isochorismate synthase O S=Rheinheimera sp. KYPC3 OX=1834037 GN=EOE67_14715 PE=4 SV=1
MCPADICCSASQLTDDLAAADNMLLAPSGNPRWTDSKLLQGYLPAQSCIVAAGSQFLLTHGCYAQFQLPTNSPGLALLLQDKLAAAKADGVVEPVLIQLIPFDPGQNASFLIPRQVERIGADKLTTRLQQQAKTSAPLRLGHNKAAEFTRQVRQAVQLLQQPKLKKLVLGRAIECHSEQLDLADCLLSLLQQNPGAATFAVPLPGGEVWFGASPELLLARHGNQIRTQPLAGTCRRDLTDLTRDQAQAEVLRHSPKDRYEHQLVVQQISEVLAPYCKILQVPAEPSLLATSRLWHLASDIQAELVNADIPSLDILQLLHPTAAVCGQPTAAAREAIRQIETYQRDFFCGAVGWQDLAGNGQWQVMIRCARAKAGQLTLYAGAGIVSASEPAAELAETNAKFATMLGALGLPELTEAC

SEQ ID NO: 94728 - protein, 372 aa, Rhizobium etli
  misc_feature (1)..(372): tr|A0A1L5P9Q2|A0A1L5P9Q2_RHIET Isochorismate synthase p rotein OS=Rhizobium etli 8C-3 OX=538025 GN=AM571_PA0002 7 PE=4 SV=1
MNARFDLTTPGYRLRARGVAQRIDPDHWDGASVADAVDAALAAANGKTSDGAKRIVVGLVPFDTSRKAVFYVPEEAEFHTDYPAASLPREERRNVFEIHGADSPSYRENVTEALKRIQSGALDKVVLARSVTVDFNSPIDIDAVYARLCARNGSAYVYRVDLPDSLEQKTSSVLLGASPELVLSSDKGKIRSTPLAGSTPRAANALADEEVARALLNSRKDLAEHSMVVKAVGETFRQFADKVDVPSTPQLVQTPVIWHLGTYITGMLRENVSPIALAYALHPTPAVGGWPQDAARKTIAELEDFDRGFYAGLIGWMDEDGNGEWVLTLRCGIVNGSKATVFAGAGIVAGSDPEKEHTETSTKLQTFINALG

SEQ ID NO: 94729 - protein, 391 aa, Rhizobium pusense
  misc_feature (1)..(391): tr|A0A4U1JVJ5|A0A4U1JVJ5_9RHIZ Isochorismate synthase O S=Rhizobium pusense OX=648995 GN=CFBP5496_16400 PE=4 SV =1
MKTGALRTNDVESDEIADFNRDFLFTSGTGQLRAKGIRERIRLPARGGEDTGSPLQQAIKAAFERARRAGQDNPIAIGAIPFDVSEPSCLYIPNNHEWSPRETAPVVADSAMPALVGQNSLPDETGFKRAVEHAIVNFRHSDVRKAVLSVMRELTFASEVNVERLLASLAKQNREGYQFRIPLPDGGDLIGVSPELLIRKQGENIISNPLAGSAKRMVDPAADKANAERLSASEKDHYEHSLVIEDIRSLLSPVCAELDVPEKPSLINTAALWHLSTRIEGRLADPETNALQLACLLHPTPAVCGFPTERAHRLIRFVEPFERGLFTGMVGWTDSEGNGEWVVTIRCGTVQRKTVRLFAGAGIVEASEPESEWAEVQTKLKTMLNACGLSA

SEQ ID NO: 94730 - protein, 391 aa, Rhizobium radiobacter; identical to SEQ ID NO: 93239
  misc_feature (1)..(391): tr|A0A5B8KP17|A0A5B8KP17_RHIRD Isochorismate synthase O S=Rhizobium radiobacter OX=358 GN=CG010_023255 PE=4 SV= 1

SEQ ID NO: 94731 - protein, 391 aa, Rhizobium sp.
  misc_feature (1)..(391): tr|U4QCB4|U4QCB4_9RHIZ Isochorismate synthase 1 OS=Rhiz obium sp. IRBG74 OX=424182 GN=entC PE=4 SV=1
MKTGALRTNDVESDEIADFNRDFLFTSGTGQLRAKGIRERITLPARGGEDTGSPLQQAIKAAFERARRAGQDNPIAIGAIPFDVSEPSCLYIPNNHEWSPRETAPVVADSAMPALVGQNSLPDETGFKRAVEHAIVNFRHSDVRKAVLSVMRELTFASEVNVERLLASLAKQNREGYQFRIPLPDGGDLIGVSPELLIRKQGENIISNPLAGSAKRMVDPASDKANAERLSASEKDHYEHSLVIEDIRSLLSPVCAELDVPEKPSLINTAALWHLSTRIEGRLADPETNALQLACLLHPTPAVCGFPTERAHRLIRFVEPFERGLFTGMVGWTDSEGNGEWVVTIRCGSVQRKTVRLFAGAGIVEASEPESEWAEVQTKLKTMLNACGLSA

SEQ ID NO: 94732 - protein, 316 aa, Rhodobacter capsulatus
  misc_feature (1)..(316): tr|A0A4U1JN67|A0A4U1JN67_RHOCA Isochorismate synthase ( Fragment) OS=Rhodobacter capsulatus OX=1061 GN=FBT96_18 520 PE=4 SV=1
RPAPPPPPAPRPRPQPPARGYIDSVARALEIMRREDGLPEALQKIVLARTLLVEEAQAFPMREVLARLSEDPSVTAFQVSLPARADQGAPRHLVGATPELLLQKRGATILSHPLAGSARRCEAREADARAAQALARSEKDQREHRLVVDYILDLLAPDCAELSTPEGTALTKTRSMWHIGTRITGRLKDPDTPAVVLAARLHPTPAVCGLPCARAAGLIRSLEPVERDFYAGAVGWCDRRGDGDWHVAIRCAELCGAQARLYAGAGIVLGSEPRAEAAETGAKFGALLAALGLPRDAALLDLPRDAALLDLDPRHD

SEQ ID NO: 94733 - protein, 401 aa, Rhodobacter sp.
  misc_feature (1)..(401): tr|A0A421BUF8|A0A421BUF8_9RHOB Isochorismate synthase O S=Rhodobacter sp. BO-81 OX=2294033 GN=DYS74_04900 PE=4 SV=1
MTLPSPASHADAGALPGPNQPFAFRNAAGRVCAMGPAHALARGTRDSLAERLAPFFAGPADGAVIGGALPFDTTRPDCLWQARGGDGTWPGDGAASTEPPSRPVPPRPQPPARGYIDSVARALEIMRREDGLPEALTKIVLARTLLVEEAQAFPLRQVLARLSEDPSVTAFQVSLPSRADQGAPRHLVGATPELLLEKRGAAILSHPLAGSARRLEDAQADAQAAQNLARSEKDQREHRLVVEYILDLLAPDCAELSTPEGTTLTTTRSMWHIGTRIEGRLKDPDTPAVVLAARLHPTPAVCGLPCARAAGLIRSLEPVERDFYAGAVGWCDRRGDGAWHVAIRCAELCGAQARLYAGAGIVLGSEPRAEAAETGAKFGALLAALGLPRDAALHDLDSLHD

SEQ ID NO: 94734 - protein, 371 aa, Rhodobacteraceae bacterium
  misc_feature (1)..(371): tr|A0A418SFP8|A0A418SFP8_9RHOB Isochorismate synthase E ntC OS=Rhodobacteraceae bacterium Lw-13e OX=1537215 GN= entC PE=4 SV=1
MTFFPASFPSASSGLTAGSAALPYRIGSRHGIAHKWSRGSVAALAARIGESYVAALPFARSGTGMLLTGLSPATAEAAPATAPRLLTHQEVPAAADYAAAVAEAVRRLKADPAFRKVVLARGLDLTFERAPDPQALLAELSRDPVALPFLLPIHDPSREAAKQLIGASPELLLEKTGTAVRSHPLAGSARRTGHAAEDHAAAARLTDSGKDRGEHALVVEYISDTLAPLCRDFTPPGPPEVFTTDSMLHLGTPIRATLRDADHTAFDLAVRLHPTPAVGGTPMEQAERTIADLEAAPRDFFAGAIGWGDSTGDGAWHIAIRCAELLGTRARLFAGAGIVEGSDPAAETAETGAKFGTMLRALGCAALRDQL

SEQ ID NO: 94735 - protein, 381 aa, Rhodococcus agglutinans
  misc_feature (1)..(381): tr|A0A438BED9|A0A438BED9_9NOCA Isochorismate synthase O S=Rhodococcus agglutinans OX=1644129 GN=EGT67_11270 PE= 4 SV=1
MDGFLLSRPDRTLRTTGARDRFDSATAATAALAAGRTELIVGALPFDPAAPAALTAPETVSWAPGPWRPATPNPAPLPRVRIESEIPSAAEHVERVRGLLERLGRGELDKVVAARAVRLVADGPISPEALAAHMVVRHEAANGFAVDLTAAGAGYVGHTLVGASPEILLSRRGTTVTCRPLAGSAPRHTDPAADRAEGDRLLASAKNLAEHAFVVDWIRDVLSPLCTDLDVPSTPQLTRTGELWHLASPIRGELRDASLGSLDLATRVHPTPAVCGTPTDRALDTIREIEGDRRFYGGAVGWCDAAGDGDWVVAIRCAEIDADGTTALAWAGGGIVAASDPVAELDETTTKLGTLLGALGVDSPAADTAGDTLTRISRTHE

SEQ ID NO: 94736 - protein, 360 aa, Rhodococcus coprophilus
  misc_feature (1)..(360): tr|A0A2X4U7S3|A0A2X4U7S3_9NOCA Isochorismate synthase O S=Rhodococcus coprophilus OX=38310 GN=dhbC_2 PE=4 SV=1
MDGFLLSRADRTVHATGTRRLFDDVASASRALHRGDADLVVGALPFDPTRPVALAQPDHTEITDGPWEAPDDLPDLPEVQRTQEIPLPRVHVARVRALVERLELGEFDKVVAARKVALAAETPIDPLTLAARMVARHPDAATFAVDLSAAGERFWGHTLVGASPELLVSRRGNTVTCRPLAGTAARREDPDDDLRAGKDLLESEKNLAEHRYVVEWIRARLAPLCDELTIPETPELTSTPDVWHLATPITGRLRDAETDALTLATALHPTPAVAGTPTEAAMDAIARVEGDRRFYGGAVGWCNSDGDGDWFVAIRCAELSSDCRRAIAWGGGGIVADSDPHAELDETTAKLRTLLGALGV

SEQ ID NO: 94737 - protein, 362 aa, Rhodococcus erythropolis
  misc_feature (1)..(362): tr|C0ZRS3|C0ZRS3_RHOE4 Isochorismate synthase OS=Rhodoc occus erythropolis (strain PR4 / NBRC 100887) OX=234621 GN=RER_11150 PE=4 SV=1
MDGFVLSRPDHSVVTRGVRRSFDSSDAATHALSAGTTKLIVGALPFDPAAATALYEPAEATITSRPWQPCDPQALPTTRVDREIPSSSEHLRRVEKLIGRLRSGEIDKVVAARTVELRTQTPISPTALAARMAALNPVANTFAVDLSAAGAEFEGHSLVGATPEVLVSRRGRVVTCRPLAGTTKRSADADQDREAGESLLHSTKNLAEHAFVTAWIREVLQPMCSDLSVPVTPELTNTHEVWHLASPIRGTLRNDTTALDLAIALHPTPALCGTPTDAALKVIRETEEPRRFYGGAVGWCDEAGDGDWVVAIRCAEISADGRNAWASAGGGIVAESDPQDELDETSTKLRTLLTALGAETLD

SEQ ID NO: 94738 - protein, 357 aa, Rhodococcus fascians
  misc_feature (1)..(357): tr|A0A161GMM3|A0A161GMM3_RHOFA Putative isochorismate s ynthase MenF OS=Rhodococcus fascians D188 OX=1051973 GN =menF PE=4 SV=1
MKLRFVLSRQDHHVVGLGVQQQFPDVADAVAAVQQGRNVVGVLPFDMSDATALIEPAEFYRRAGAWAVPDAQPPLPSVTVVRQIPEPGVHVERVREVVRRVKAGVAEKIVLARAIELAAESPIDPSAVLSALVTRDPMGNGFFADLSPADEPGRHLVGASPELLVRKRGNVVSCHPFAGTAARSTDPDEDARISAALAASAKDQAEHRFVVDEIKAALAPFCETLDVPATPQLSSTPQLWHLSTPIVGTLADPSTSALDLALALHPTAAVAGVPRAAAMRAITEIEGSRGFYAGALGWTDGSGDGEWMVAIRCIELTADGLSGTATAGGGIVADSDPDAELDETTAKFRTVLSVFEN

SEQ ID NO: 94739 - protein, 380 aa, Rhodococcus gordoniae
  misc_feature (1)..(380): tr|A0A379M3F9|A0A379M3F9_9NOCA Isochorismate synthase O S=Rhodococcus gordoniae OX=223392 GN=dhbC_2 PE=4 SV=1
MQVPVLGATATDRAERPVAHPFVLSRPHGTVVAEGVSERFDHPSAAAEALRTGRITALVGALPFEVGRPAALTAPHLLHHSPAPYAAPAGDLPPIAITGALPSEGEHIDRVTTALRLLRSDESELLKVVLARALVLRAGRPVGPHELLAALVRNDPLHNGFLVDLAAAGDPWTGRHLVGSSPEVLVCRRGDRVTAHPLAGSAPRHRDPEIDRATAETLAGSAKNLAEHAHVIDAIRTALEPLCADLDIPDRPMVTSTRQLWHLGTPVEGRLRDPDVTALDLALAVHPTPAICGTPTAAARDLILATEGDRGFYAGAVGWCDGRGDGEWMVTIRCAVLEPDGVGLTAYAGGGIVADSDPADELAETTVKFGTVLDALGVLR

SEQ ID NO: 94740 - protein, 379 aa, Rhodococcus hoagii
  misc_feature (1)..(379): tr|E9SWY0|E9SWY0_RHOHA Isochorismate synthase OS=Rhodoc occus hoagii ATCC 33707 OX=525370 GN=HMPREF0724_10630 P E=4 SV=1
MDGFLLSRSDRTLRTAGTRDRYDTVAAAAAALADGRVELVVGALPFDPSAPTALTAPATAAWTDEPWRPDTVAPLPRVTIAGEVPSPAEHVARVRRLVDRLRGGEFDKVVAARAVRLTADAPIDPEALAARMIRRHETANGFAVDLTASGEGYRGHTLVGASPEILLGRRGDVVTCRPLAGSAPRRADPDADQAEGAELLASAKNLAEHAYVVEWIREVLAPLCAELDVPASPELTRTGELWHLASPIRGRLLDGSVSSLELARRLHPTPAVCGTPTDRALDAIRDVEGDRRFYGGAVGWCDGVGDGDWVVAIRCAEIDADGTSALAWAGGGIVAASDPDTELAETTTKLGTLLGALGVDAHAAAPAGDTLTRTSRTHE

SEQ ID NO: 94741 - protein, 363 aa, Rhodococcus jostii
  misc_feature (1)..(363): tr|Q0S661|Q0S661_RHOJR Isochorismate synthase OS=Rhodoc occus jostii (strain RHA1) OX=101510 GN=RHA1_ro05194 PE =4 SV=1
MDGFLLSRADRTLRTSGARHGYDTAAAAVAALSNGDTELIVGALPFDPQRPAALTAPESWEFTDGPWRPGAVPDLPSVRLTREIPDPTEHVARVRSLVDRLREGALGKVVAARSVTLRADTPISAEALAARMIHQNPTANGFAVDLSAAGEGFRSHSLVGASPEVLLSRRGRRVTCRPLAGTAPRRADPEADEKEGRGLLESTKNLAEHAFVTAWIRDVLAPLCTELTVPDSPVLTSTHEVWHLATPIEGVLRDASTSALSLATRLHPTPAVCGTPTDLALATIRDVEEDRRFYGGAVGWCDGDGDGDWVVAIRCAEIAADGLEALATAGGGIVAESDPESELDETTTKLRTLLRALGVQQGP

SEQ ID NO: 94742 - protein, 363 aa, Rhodococcus opacus
  misc_feature (1)..(363): tr|A0A1B1K0N4|A0A1B1K0N4_RHOOP Putative isochorismate s ynthase OS=Rhodococcus opacus OX=37919 GN=menF2 PE=4 SV =1
MDGFILSRADRTLRTSGARHGHDTAAAAVAALANGDTELIVGALPFDPERPAALTAPESWEFTDGPWRPGTVPDLPSVHLTREVPDPAEHVARVRSLVDRLREGTLGKVVAARSVTLRADTPISAEALAARMIHQNPTANGFAVDLSAAGESFRGRSLVGASPEVLLSRRGRRVTCRPLAGTAPRRTDPEADEKEGRGLLESTKNLAEHAFVTAWIREVLAPLCTELTIPDSPVLTSTHEVWHLATPIEGVLRDPSTSALSLATALHPTPAVCGTPTDLALATIRDVEEDRRFYGGAVGWCGGDGDGDWVVAIRCAEIAADGLEALATAGGGIVAESDPESELDETTTKLRTLLRALGVQQSP

SEQ ID NO: 94743 - protein, 362 aa, Rhodococcus qingshengii
  misc_feature (1)..(362): tr|A0A4S5EFW1|A0A4S5EFW1_9NOCA Isochorismate synthase O S=Rhodococcus qingshengii OX=334542 GN=EU244_16160 PE=4 SV=1
MDGFVLSRPDHSVVTRGVRRSFDSSDAATHALSAGTTKLIVGALPFDPAAATALYEPAEATIASRPWQPRDPQALPTTRVDREIPSSSEHLRRVEKLIGRLRSGEIDKVVAARTVELRTQTPISPTALAARMAALNPVANTFAVDLSAAGAEFAGHSLVGATPEVLVSRRGRVVTCRPLAGTTKRSADADQDREAGESLLHSTKNLAEHAFVTSWIREVLQPMCSDLSVPATPELTNTHEVWHLASPIRGTLRNDTTALDLAIALHPTPALCGTPTDAALKVIRETEEPRRFYGGAVGWCDEAGDGDWVVAIRCAEISADGRNTWASAGGGIVAESDPQDELDETSTKLRTLLTALGAETLD

SEQ ID NO: 94744 - protein, 360 aa, Rhodococcus rhodochrous
  misc_feature (1)..(360): tr|A0A385L8B2|A0A385L8B2_RHORH Isochorismate synthase O S=Rhodococcus rhodochrous OX=1829 GN=C6369_005520 PE=4 SV=1
MDGFLLSRAERSVHATGTRRFFDDVHSATQALRSGKATIVVGALPFSPHRPVALAQPEDVEITDGPWQAPSDLSELPPVRISTELPLPRVHVERVRRLVEQLSLGEMEKVVAARRVALEADEPLDPLALAARMIERHPDAATYALDLSAAGERYWGHTLVGATPELLVSRRGDTVTCRPLAGTAARRADPDEDRRAGEELLTSDKNLTEHGYVVDWIRTRLAPLCSDLDIPDKPELTATPDVWHLATPITGTLRDAGTDALTLAHVLHPTPAVAGTPTEAALDAIARVEGDRRFYGGAVGWCDEQGDGDWFVAIRCAELSSDGRRAVAWAGGGIVADSDPVAELDETTAKLRTLLGALGV

SEQ ID NO: 94745 - protein, 396 aa, Rhodococcus ruber
  misc_feature (1)..(396): tr|A0A098BSU7|A0A098BSU7_9NOCA Putative isochorismate s ynthase OS=Rhodococcus ruber OX=1830 GN=menF PE=4 SV=1
MQAPVAARGTAASRQVDTAASRQVDTAASRQVTAAAPFVLSRPHGTVVADGVDVRFDSADEAAAALRAGSVAAVVGALPFAPDHRAALTAPVALRHEPDPLGDGAVPLAPVRIAATMPAEDEHLDRVATALRQLRDPADDLAKVVLARALLLRADAPVDPMSLLARLAGNDPAGNGFAVDLTAAGGAWTGRHLVGASPEVLVRRRGDLVTCHPLAGSAPRHPDPEVDGRTAQRLAASEKNLAEHAHVVEALRASLDPLCSDLDIPRTPTLTSTRQLWHLGTPIAGRLRDRSVTALDLALVVHPTPAICGTPTAAARALIRELEGDRGFYAGAVGWADRDGDGEWMVTIRCAVLDADGTTLTTHAGGGIVAGSDPLDELAETTTKFGTVLDALEVRR

SEQ ID NO: 94746 - protein, 378 aa, Rhodococcus sp.
  misc_feature (1)..(378): tr|A0A0K2Y9G2|A0A0K2Y9G2_9NOCA Putative isochorismate s ynthase OS=Rhodococcus sp. RD6.2 OX=260936 GN=menF PE=4 SV=1
MTTGTATNAATPHEPSGPAEPHFILSRPHGTVTARGVTHAITDPAHAVARLRAGAPIVGALPFDVREPAALTVPGRLDVTTTPLPVPSRPAVPTVTVRRHVPSPAEHTRRVADTVTRLRETSLRKVVLARALELDAAEPLDHRAILDRLVAADPSGNGYSVDLGPAGDDHRGVRLVGSSPEVLIRRQGTTVTCHPLAGSAPRDPDPDRDAALGRALAASTKDLTEHAYVIESLTQSLAPLCTDIVVPDGPVLTTTPQLWHLGTPLRATLRDPAVTALELALAVHPTPAVCGTPTDEAMRTILELEGSRGFYAGAVGWSDASGDGEWMVTLRGAQIAADGLHVVAHAGGGIVAASDPETELDETTTKFGTIMAALGVTA

SEQ ID NO: 94747 - protein, 463 aa, Rhodocyclaceae bacterium
  misc_feature (1)..(463): tr|A0A5C7JXR0|A0A5C7JXR0_9RHOO Isochorismate synthase O S=Rhodocyclaceae bacterium OX=1898103 GN=E6R10_10190 PE =4 SV=1
MKTPTAPSGLLALNEAQWRDIGCRLDRLAANAPSGALLTVTLPLGHGDTCNAGHDWLDRQPKAAEVCYWSQADSGSHRLGLGRAVVCTSAGPARFTALQAAFNGIAQQWLHDAGGTDFQPFACIGFAFDDDSADVLPNAQLGVAAVVLDNQHGALRASFTTPAREAATAVARWQALLTAEPGEPQRPVVGHLADPTLAQRAWQLRVDAALQAIADGKVRKLVLSRSRRLSLADDRVGAALLRRLLSQHRESTVFAMGTAKGFFCGATPERLLAFRDGEVQTDALAGTAWGEAELAIDKNLREQQLVVEAIRASLLPLCRTLDVPPAPTVMHLRELQHLHTPISGHTHAGVGLFDLLARLHPTPAVGGWPTAPAREWLRHHDERRPGWYGGGFGWIDRAGNGEIAVALRCGLITPGRIELSAGAGIVAGSTAAHEFDETEAKLGTMLAALRDADAGTQQTGTRG

SEQ ID NO: 94748 - protein, 453 aa, Rhodocyclales bacterium
  misc_feature (1)..(453): tr|A0A3L6LYD6|A0A3L6LYD6_9RHOO Isochorismate synthase O S=Rhodocyclales bacterium GT-UBC OX=2316108 GN=D3M94_18 515 PE=4 SV=1
MIERLRQRLLAPDLLRRLAHLADAAPASAPLSLSLDLGPGEENWLHLLPDQHACWYRARPKDKEYRLGIGHLLQVESCGGQRFAALDHAWSSLCRYWRHELAARPLTFAGFAFDEQGGSPLPNALLALPAILFESIDGHCRVTLNTLAGERERAIGNWLQWLAVPPTAGPRHNCGFSRPDPARDGPLADQAWMARVKAALRDIDAGRVDKLVLSRRRLLASSAHCTVREVLTGLLQQQAGSLIYAFGNGQQFFLGATPERLLWKNGCTVRADALAGTAWPGSPGLRAGKNHHEQSLVVRAVVEALAPLCATAPEVEAQSEQAAGRLRHLRNEICARLNPGTSVWDLVAALHPTPAIGGYPRPAALDWLRRHDEYRGAWYSGGFGLLEGNGDGEFSVALRSALFDAPYIELQAGAGIVAGSQATDELAETEAKLGTLLAALQPLTAARQQRQAG

SEQ ID NO: 94749 - protein, 482 aa, Rhodohalobacter sp.
  misc_feature (1)..(482): tr|A0A371QHP2|A0A371QHP2_9BACT Isochorismate synthase M enF OS=Rhodohalobacter sp. SW132 OX=2293433 GN=menF PE= 3 SV=1
MISAERFPKTTTEFIETLDSESFKAFLHALSQEKKNPDRLISITLPIAPIDPLVALEQHSSEEDKFYWDHPVNKISISAAGKVSELRATGQNRFDEISEKTNKLKKRISAYTSVTHNMAGPLFLGGYSFGDHNVGKIWKRFGAARFVLPEWILVKSGHRHMLTLILERKSKAIHDIYMEIIERVTDFLNISGRHALPAPAINGNQNILCNMQSAFDKPTWLDRVDRAKDLIHEKAFEKIVLARSVKLKSKHNLNPTLLSYHLREKYPECYNFIIQIDKETSFIGATPERLASFEDGTFKTEGLAGSTSRGKSASEDAALAQSLLDSHKDRIEHQFVVRAIDNSLAPYSYRVEHPNKPQIKKLNNVQHLFTPISATIKSGVKIHDLVQQLHPTPAVGGFPRENAVPFIQEIEQIERGWYAAPVGWYNLNGCGEFAVAIRSALLHKNNAHLFAGCGIVGDSDPESEWQETLMKFQPITTALNEL

SEQ ID NO: 94750 - protein, 409 aa, Rhodoluna lacicola
  misc_feature (1)..(409): tr|A0A060JL99|A0A060JL99_9MICO Isochorismate synthase O S=Rhodoluna lacicola OX=529884 GN=Rhola_00002120 PE=4 S V=1
MTAGQKLTLTTRELHTDDFKLLSHLPETPLAFIRGGDGIVGWGEAVRLESNLSAGRVADLAAQWRTLVAAAEVTDEVQLPGTGLVAFGTFAFSDLSKAASTLIVPQVILGSRDGRVWLTTVSGAAAPDFWTHSAEYKANASINFETGEISAEKFKELVSSAVEKINSGTLAKVVLARDVIAKLPEKFDVRSVLQKLAHQYPTCWVYSVDGMFGASPELLVRVSHAQVSARVLAGTAGRGTDPGVDQAIAVALAASSKNTAEHAFAVDSLVKSLAPFCTHVDADPTPFSLALPNVWHLASDVHGVLREDASVLDVAAALHPTAAVAGTPTDVAQNLIAKLEGSDRGRYAGPVGWIGADGDGEWAIGLRGAQITDKTIRAFAGCGIVAESEPEAELAETDLKFRPIREALA

SEQ ID NO: 94751 - protein, 472 aa, Rhodothermaceae bacterium
  misc_feature (1)..(472): tr|A0A1V0DD43|A0A1V0DD43_9BACT Isochorismate synthase M enF OS=Rhodothermaceae bacterium RA OX=1779382 GN=menF PE=3 SV=1
MPHPSFTGTPAAAEDLVQARQALARAVRRVLGHRNGATEQAPRVRQVQVPLPPLDPFRWLQAQTLFPRVYWSGRHDAEARCGVGAAHLLAADADADVDALQRLLAPVLAGSEAPVRYLGGLRFDAARPTAPRWRPFGTYRFVLPRFELHGAGEDARLVCNLLLPFDYERADAILAELDALVLEEGPPRGSLSLPTARDDRPGLEGWRDNIRWALHAFASSTLEKVVLARRALFHLEAPIDPYLLLSNLQPATPNCFHFCFQFEPGAAFLGASPERLFHRAGRQIRSEAVAGTRPRGASDLDDARLRDELLRSEKDQREHAYVRDSIERALAPLCEHLHVDARASVMRLARGRHLVSGVHGTLHPGATDFEVLRRLHPTPAVGGYPTAPALEAIRTLEPFDRGWYAGPVGWIGPDAAEFAVAIRSGLVEGARLALYSGAGIVRGSTPEAEWDEIEHKISDFINVLGLDLRRAK

SEQ ID NO: 94752 - protein, 509 aa, Rhodothermaeota bacterium
  misc_feature (1)..(509): tr|A0A368D352|A0A368D352_9BACT Isochorismate synthase O S=Rhodothermaeota bacterium MED-G64 OX=2164156 GN=DBW78 _04080 PE=4 SV=1
MSAPLEHIHMRKTTTSHNSLEKSSAFEYAQTHRAPSSPEWTVFTVDWDVESLLKQLQIRSAGQSNARFVWKAPDSNTSKGEEFVALGRYQALKATGERRFHDLAQAERSLLGKTHFIDLRSNRQPSVPFIVGGAAFHQFNIDPTWSAFGSSQFILPRLLVGTDSNGQGYLRFILPSEEATTWLGHGQSTHSSHSHVFLLEKLEDVLKSEGVDTNKSSTLPYFHLDPVSLAHRLQTAASQHKKAWIARFQRAIEVIQQNPIAKVVLARQAAVHGVTMEQRANLQESLKQRYQNCIHFCVEPTSAAGFFGATPERLLRLQGRHLRIDALAGSRSRGTTTHEDQTLAHDLLHAEKDAMEHDIVKRQILEVLEPISKQLRYPSAPLLKTLPNVQHLHTPIEAELEHSPSVFELIEQLHPTPAVGGYPKHDALGVIEQIEPQNRGWYAGIVGWVSEQGDADMAVSIRSASHMKDALTLYAGCGLVEGSIPEQEWEETYVKLAPFFEAAQDVAHA

SEQ ID NO: 94753 - protein, 466 aa, Rhodothermus marinus
  misc_feature (1)..(466): tr|G2SEN8|G2SEN8_RHOMG Isochorismate synthase MenF OS=R hodothermus marinus (strain SG0.5JP17-172) OX=762570 GN =menF PE=3 SV=1
MRRTDPSAVEGALPVCAPEELPRVLGGRIRRALRQPTAEIVQLRCPVASLDLLTWLAAQPEPVKFYWADRENAEAVAALGAVLLHEITHPLTREALASVEDRLRRADPGVRFYGGGRFDSRASVAPHWEPFGAGRFWLPRFELRREANRYWLICNLVPELDRERVETIVEALRALRWPEVPLTPELPLPLDRRDTPDQAGWARNVARALDAFRRGRMEKVVLARQVQYTFGEVLDGLALLERLQEATPGCFHFYYQPEPGTAFLGASPERLFRRADGHVWSEAVAGTRPRGRTEADDARLAAELLQSEKDRREQYYVQQSIVEELRPLCEALDADAKLSEMTLARGRHLYTGIRGRLRPAVPTGALLEALHPTPAVGGYPRAAAMEAIRAWEPFDRGWYTGPIGWLGADAAEFAVAIRCGLVAGRHLYLYSGAGIVEGSVPALEWDEIEHKISDFVNVLGLELRRS

SEQ ID NO: 94754 - protein, 455 aa, Rhodothermus profundi
  misc_feature (1)..(455): tr|A0A1M6Q7Q4|A0A1M6Q7Q4_9BACT Isochorismate synthase M enF OS=Rhodothermus profundi OX=633813 GN=menF PE=3 SV= 1
MPACAPAELPRRLGSRIRRALQQTGTNRIVQLRCPIAPVDLLSWLAAQSMAFKFYWADREGNEAVAAVGAVLQCEVNRALTRESLRFLETYLQQADPGVRFYGGGRFDGQAPVAPHWQPFGMGRFWLPRFELRREGSRYWLVCNLVPELDRTAEAAIKEALAALQWPEVAMDARLPLPVDRCDMPDQAGWTRNVTQALAAFQQGHMVKVVLARQVQYVFNEALDGLALLHRLEEATPGCFHFYYQPQPGTAFLGASPERLFRRADGHVWSEAVAGTRPRGQTEADDARLAAELLQSEKDRREQYYVQQSIIEELRPLCETLEADAQLSEMTLARGRHLYTGIRGRLRPGVSTGALLEALHPTPAVGGYPRPAAVEAIRAWEPFDRGWYTGPIGWLGVEAAEFAVAIRCGLAAGHHLYLYSGAGIVEGSVPELEWEEIEHKISDFVNVLGLELRRS

SEQ ID NO: 94755 - protein, 81 aa, Richelia intracellularis
  misc_feature (1)..(81): tr|M1X578|M1X578_9NOST Menaquinone-specific isochorisma te synthase OS=Richelia intracellularis HH01 OX=1165094 GN=RINTHH_9910 PE=4 SV=1
MLSIKKNCQENNSTKIASIYLEIDLVDPLVLFSRILKVNQLNFYWENKANQESIVAIDAVINKELSGVERFISAEKFIKNV

SEQ ID NO: 94756 - protein, 556 aa, Ricinus communis
  misc_feature (1)..(556): tr|B9R951|B9R951_RICCO Isochorismate synthase, putative OS=Ricinus communis OX=3988 GN=RCOM_1513750 PE=4 SV=1
MATAAVAKHCLARFMDLESAKCSLSGQPISTKQSLHLFHNRYQSCSVSMNGCQSDPRVPIGTIETKTFPALPSPAMAMETLNFAISDIKANPPLLTSGIIRLQVPIKQQIEAIQWLHAQHDLLPRCFFSGRSRRKDDTDLFLDFNGGNGSVHNLVSVAGVGSAVLFTHIHPFSYNDWKSIKRFLSAKCPLVRAYGAIRFDAMANISSEWESFGSFYFIVPQVEFDELEGSSMLAATIAWDNALSWTWEQAIDALQLTMSQISSTAVKLCKEFSRTFILNINHFPSKTYWDLAVKRALQIINRRSSPLTKVVLARSSRVVTANDIDPITWLACLQVEGENAYQFCLQPPNSPAFIGNTPEQLLHRKWLGVSSEALAGTRARGGSKALDLQIELDLLSSPKDHLEFAIVRDSIRRKLEAMCSRVVIEPNKAIRKFSRVQHLYAQLSGTLRSEDDEFDILSSLHPTPAVCGFPTEEARLLIAETEVFDRGMYAGPVGWFGGGESEFAVGIRSALVEKGFGALIYAGTGIVEGSNPSLEWAELELKTSQFAGQFSKLLIT

SEQ ID NO: 94757 - protein, 473 aa, Rivularia sp.
  misc_feature (1)..(473): tr|K9R5E5|K9R5E5_9CYAN Isochorismate synthase family pr otein OS=Rivularia sp. PCC 7116 OX=373994 GN=Riv7116_00 59 PE=4 SV=1
MTVSPCSAEFFVYNKELYQFLVKKRAYCIKNNCTQIASIGLEIDSVDPLVVFQKLSASNKLNFYWENPSKEEAIAAIDAVTKFHIEGKERFIQAEKFIKYNLGKIINFCNVNHSFSQPLFFCSFSFFDTNLQENYPFFPATVFLPKWQVTRKEKCCILRANIKIDADLNIEKTLKILWQKITSINLLKYDAVDLDNSQPQFIKNSITKSSKFQRSVLSALEDIRKGTYSKIVLADALNIQSSTPLNLFKSLNNLRQLHPNCCVFSTSNGKGQNFIGASPETLIAIRNQKLNTDALAGSAARGKTPAEDAKKANLLLNSQKERHEHSLVIDFITQKLLSLGLLPQVSTPRLRQLSNIQHLWTPIIAKVPRNVHPLQIVSQLHPTPAVAGVAPEVACQEIRRYESFERGLYAAPLGWIDAEGNCEFVVGIRSALIDTSTKSSLLYAGAGIVPGSDPQKEFAEIQLKLQALLKALT

SEQ ID NO: 94758 - protein, 355 aa, Robertkochia marina
  misc_feature (1)..(355): tr|A0A4S3M2Q5|A0A4S3M2Q5_9FLAO Isochorismate synthase O S=Robertkochia marina OX=1227945 GN=E7Z59_08935 PE=4 SV =1
MNLQPADKLWEAVAAALKNELPFVVFSPPESTRVTGYFQKDGKLVKANDDHSSGFLFAPFSEDYPVVLIPSDSIVHAEIGDLTPPESTKDQVQDIIGEDNTRKKHITLLSEALRSLKSGKLDKVVLSRKLLIPRSERDIISVFKGLLSRYPTAFRYLWHHPEVGTWVGATPETLVKIEEGMLETMSLAGTQPYRGSMDVSWGPKEKEEQAMVTRSILNRLYPHCLHVQAGDTRTVKAGKLLHLLTPVKAVLTSQELPLEEIVAALHPTPAVCGLPRKKAKKFILEHEGYDRKYYTGYLGPLSKQGSAELYVNLRCMEITDEAFSIYVGGGITKDSDPDAEWEETVNKSKTMLAVL

SEQ ID NO: 94759 - protein, 431 aa, Rodentibacter genomosp.
  misc_feature (1)..(431): tr|A0A1V3JAZ9|A0A1V3JAZ9_9PAST Isochorismate synthase M enF OS=Rodentibacter genomosp. 2 OX=1908266 GN=menF PE= 3 SV=1
MDSLVQATSQLSRQIEDYLRQKQNDIVCFQMDITNVNLLAWLKAQSIYPQFYLHFRDENKSLAAIGQVRSFSQLNLAQTFIEEYNFPIIGGLQFQGSGQFILPQLLLEENGNSTTISCFVEGETSAQNALTILKTLPKTTALCVLTKQPPLHTEQRANKRTWCDWVNQALYEIKQGGLIKLVLANETVFHLKQAINPYDFLAESQNQNQGCYHFLWAEKPYSTFVGSTPERLFAREYNLFLTEALAGTAPITADPKENQQQAEWLLNDEKNLNENWLVVQDISQNIHPMVESFDISEVELKPLRKVQHLLRKIRANLTAHYQDSALLSAIHPTAAVSGLPQQQAKMILSEIETFERGWYAGTLGLMSKAYSEFCVAIRSAFIEGNQIRIFAGAGIVEGSEPLTEWQEIERKAEGLVSLFAEKNNNGEKECL

SEQ ID NO: 94760 - protein, 430 aa, Rodentibacter heidelbergensis
  misc_feature (1)..(430): tr|A0A1V3I6G1|A0A1V3I6G1_9PAST Isochorismate synthase M enF OS=Rodentibacter heidelbergensis OX=1908258 GN=menF PE=3 SV=1
MGSLEQAASQLSLQIEQYLQQGKKDIERFQVNIANINLLAWLKSQTTYPQFYLHFRDENKSMAALGEVRKFTSLNLAQEFIEASHFPLVGGLQFQGSGQFILPQLLLETEKQNTIISCFVEGETSAQRALAQLKTLPKMTALCPLPKQIPLHTEQQANQPMWCDWVNQALYEIKQGELTKLVLANETVFHLKQPVNPYNFLAESEKQNQGCYHFLWAENPHSTFIGSTPERLFAREYNLFLTEALAGTAPITADLKENQQQAQWLLNDEKNLNENWLVVQDISQNIQAMVESFDVSEVELKPLRKVQHLLRKIRANLSAHYRDSALLKAIHPTAAVSGLPQQQARMILSEIETFDRGWYAGTLGVMSEAYSEFCVAIRSAFIERNRIRVFAGAGIVEGSEPLAEWQEIERKASGLISLFAENNDGEKECL

SEQ ID NO: 94761 - protein, 430 aa, Rodentibacter heylii
  misc_feature (1)..(430): tr|A0A1V3KHV8|A0A1V3KHV8_9PAST Isochorismate synthase M enF OS=Rodentibacter heylii OX=1906744 GN=menF PE=3 SV= 1
MDSLEQATSQLSRQIEDYLRQKQSDIVCFQTDITNVNLLAWLKAQSIYPQFYLHFRDENKSLAAVGQVRSFSQLNLAQTFIEEYNFPIIGGLQFQGSGQFILPQLLLEENGNGTTISCFVEGKTSAQNALTILKTLPKTTALCVLTKQPPLHTEQRANKRIWCDWVNQALYEIKQGGLIKLVLANETVFHLKQAINPYDFLAESQNQNQGCYHFLWAEKPYSTFVGSTPERLFAREYNLFLTEALAGTAPITADPKENQQQAEWLLNDEKNLNENWLVVQDISQNIHPMVESFDISEVELKPLRKVQHLLRKIRANLTAHYRDSVLLQAIHPTAAVSGLPQQQAKMILSEIETFERGWYAGTLGLMSKAYSEFCVAIRSAFIEGNQIRVFAGAGIVEGSEPLTEWQEIERKAEGLISLFAENNNGEKECL

SEQ ID NO: 94762 - protein, 430 aa, Rodentibacter mrazii
  misc_feature (1)..(430): tr|A0A1V3ID93|A0A1V3ID93_9PAST Isochorismate synthase M enF OS=Rodentibacter mrazii OX=1908257 GN=menF PE=3 SV= 1
MGSLEQAASQLSLQIEDYLRQEKNDIACFRMTITNVNLLAWLKARRTYPQFYLHFRDENKSLAAVGQVRLFSQLNLAQAFIEEYNFPIIGGLQFQGNGQFILPLLLLEENENTTTISCFVEDKTSAQTALEQLKTLPKTTALCVLPKQIPLYTEQRANKQMWCDWVNQALYEIKQGELTKLVLANETVFHLEQAINPYDFLAESEHQNQGCYHFLWAEDPHSTFVGSTPERLFAREHNLFLTEALAGTAPITTDPKENQQQAEWLLNDEKNLNENWLVVQDISQNIHSMVESFDVSEVELKPLRKVQHLLRKIRANLTAHYRDSALLQLIHPTAAVSGLPQQQARMILSEIETFDRGWYAGTLGLMSEVYAEFCVAIRSAFIEGNRIRVFAGAGIVEGSEPLSEWKEIERKASGLISLFAENNNGEKECL

SEQ ID NO: 94763 - protein, 431 aa, Rodentibacter myodis
  misc_feature (1)..(431): tr|A0A1V3JK02|A0A1V3JK02_9PAST Isochorismate synthase M enF OS=Rodentibacter myodis OX=1907939 GN=menF PE=3 SV= 1
MSSLEQAASQISRQIENYLRQQQTDLVRFQMEIANVNLLAWLKAQTTYPKFYLHLRDENNQFAAMGEVRSFSQLNLAQEFIEQYDFPLVGGLQFQGYEQFVLPQILLEQKNNAITMLSVFVEGEASAQSALSLIKTLAKTTALCSLPKQIPLLTEQRANQQTWEDWVKQALFEIKQGELTKVVLANETTFHLRQAINPYDFLAESEKQNHGCYHFLWAENPYSTFVGSTPERLFAREYNLFLTEALAGTAPMTGDQQENRQQADWLLKDEKNLNENWLVVQDISQNIKSMVETFDVSEVELKPLRKVQHLLRKIRANLTAHYRDSALLKAIHPTAAVSGLPQQEARMILSEIETFERGWYAGTLGIMSEAYSEFCVAIRSAFIEGNRIRVFAGAGIVEGSQPFIEWKEIERKAAGLISLFAENNKGEKECL

SEQ ID NO: 94764 - protein, 293 aa, Rodentibacter pneumotropicus
  misc_feature (1)..(293): tr|A0A4S2Q4Y2|A0A4S2Q4Y2_9PAST Isochorismate synthase ( Fragment) OS=Rodentibacter pneumotropicus OX=758 GN=D3M 76_11015 PE=4 SV=1
KTTALCALPKQIPLHTEQRANKQTWCDWVNQALYEIKQGELTKLVLANETVFYLKQAINPYDFLAESERQNHGCYHFLWAENPHSTFMGSTPERLFAREYNLFLTEALAGTAPITADPEENQQQAEWLLNDEKNLNENWLVVQDISQNIHSMVESFDVSEVELKPLRKVQHLLRKIRANLTAHYRDSTLLKAIHPTAAVSGLPQQQARIILSEIETFDRGWYAGTLGLMSEAYTEFCVAIRSAFIEGNRIRVFAGAGIVEGSEPLAEWKEIERKASGLISLFAENNYGEKECL

SEQ ID NO: 94765 - protein, 430 aa, Rodentibacter rarus
  misc_feature (1)..(430): tr|A0A1V3IE22|A0A1V3IE22_9PAST Isochorismate synthase M enF OS=Rodentibacter rarus OX=1908260 GN=menF PE=3 SV=1
MGSLEQAASQLSLQIEQYLQQGKTDIERFQVKIANVNLLAWLKSQTTYPQFYLHFRDENKSVATLGEVRSFSALNLAQEFIETYHFPLFGGLQFQGYGQFILPQLLLETDEQNTAISCFVEGKTSAQSALEQLKTLPKMTALYPLPKQIPLHTEQQANQPMWCDWVNQALYEIKQGELTKLVLANETIFHLKQPVNPYDFLTESEKQNQGCYHFLWAENPHSTFVGSTPERLFAREYNLFLTEALAGTAPITADLKENQQQAQWLLNDEKNLNENWLVVQDISQNIQAMVESFDVSEVELKPLRKVQHLLRKIRANLTAHYRDSALLKAIHPTAAVSGLPQQQARMILSEIETFDRGWYAGTLGVMSEAYSEFCVAIRSAFIERNRIRVFAGAGIVEGSEPLAEWQEIERKASGLISLFAENNDGEKECL

SEQ ID NO: 94766 - protein, 430 aa, Rodentibacter ratti
  misc_feature (1)..(430): tr|A0A1V3KXH5|A0A1V3KXH5_9PAST Isochorismate synthase M enF OS=Rodentibacter ratti OX=1906745 GN=menF PE=3 SV=1
MGSLEQAASQLSQQIEDYLRQEQNDIACFQMEIANINLLAWLKAQRTYPQFYLHFRDENKSLATVGQVRSFSQLHSAQTFIEEHHFPLVGGLQFQGNGQFILPLLLLEENENMTTISCFVEGKTAAQTALEQLKTLPKTTALCALPKQIPLYTEQQANKQMWCNWVNRALYEIKQGELTKLVLANETVFHLKQAVNPYDFLAESERQNQGCYHFLWAENPHSTFVGSTPERLFAREYNLFLTEALAGTAPITTDPKENQQQAEWLLNDEKNLNENWLVVQDISQNIHPMVESFDVSDVELKPLRKVQHLLRKIRANLTAHYRDSALLQSIHPTAAVSGLPQQQARMILSEIETFDRGWYAGTLGLMSEAYTEFCVAIRSAFIEGNRIRVFAGAGIVEGSEPLAEWKEIERKASGLISLFAENNNGEKECL

SEQ ID NO: 94767 - protein, 431 aa, Rodentibacter sp.
  misc_feature (1)..(431): tr|A0A1V3JX47|A0A1V3JX47_9PAST Isochorismate synthase M enF OS=Rodentibacter sp. Ppn85 OX=1908525 GN=menF PE=3 SV=1
MDSLEQATSQLSRQIEDYLRQKQNDIACFRTDITNIDLLAWLKAQSTYPQFYLHFRDENKSLAAIGQVRSFSQLNLAQTFIEEYNFPLIGGLQFQGNGQFILPQLLLQENEDSTTINCFVEGKTSAQNALTILKTLPKTTALCVLTKQSPLHTEQRANKRIWCDWVNQALYEIKQGGLTKLVLANETVFHLKQAINPYDFLAESQNQNQGCYHFLWAEKPYSTFVGSTPERLFAREYNLFLTEALAGTAPITNNRQENQQQAEWLLSDEKNLNENWLVVQDISQNLNPMVESFDVGEVELKPLRKVQHLLRKIRANLTAHYQDSALLSAIHPTAAVSGLPQQQARMILSEIETFERGWYAGTLGLMSEAYSEFCVAIRSAFIEGNRIRVFAGAGIVEGSEPLTEWQEIERKAAGLISLFAEKNNNGEKECL

SEQ ID NO: 94768 - protein, 430 aa, Rodentibacter trehalosifermentans
  misc_feature (1)..(430): tr|A0A1V3IUP7|A0A1V3IUP7_9PAST Isochorismate synthase M enF OS=Rodentibacter trehalosifermentans OX=1908263 GN= menF PE=3 SV=1
MGSLEQAASQLSLQIEQYLQQGKKDIERFQVNIANVSLLAWLKSQSAYPQFYLHFRDENKSIAALGAVRKFSSLNLAQEFIEHFHFPLLGGLQFQGCGQFILPQLLLETNEQHTTISCFVEGKASAQSTLAQLKTLPKMTALCPLPKQIPLYTEQGANKQMWCDWVNQALYEIKQGELTKLVLANERVFHLKQPVNPYDLLAESEKHNQGCYHFLWAENPRSTFVGSTPERLFAREYNLFLTEALAGTAPMTADLKENQQQAEWLLNDEKNLNENWLVVQDISQNIKPMVESFDVSEVELKPLRKVQHLLRKIRANLSAHYRDAELLKAIHPTAAVSGLPQQQARMILSEIETFDRGWYAGTLGVMSEVYSEFCVAIRSAFIEGNRIRVFAGAGIVEGSEPLAEWQEIERKASGLISLFAENNDGEKECL

SEQ ID NO: 94769 - protein, 606 aa, Rosa chinensis
  misc_feature (1)..(606): tr|A0A2P6P2G1|A0A2P6P2G1_ROSCH Putative isochorismate s ynthase OS=Rosa chinensis OX=74649 GN=RchiOBHm_Chr7g018 0661 PE=4 SV=1
MLSQKVSLSFYKSLAYHIFPSPIGSSLFVSPMAAGSAAAVGRRCLACFMDPESAKCSSTISSSSSSSRQTIHFPNHRNSHQRFCSLSMNGCQGDHPHLPLGTVETRSFPAVPSPSLAVETLSSALSQLKANPPAYTSGIIRLQVPIQQKIEAIDWLYAQNKLLPRCYFSDRAQTGNPKRSIDCANGNGNGNGQSPKKHNKLVSVAGVGSAVFFQDLHPFSYRHWKSLKRFLSTDCPLIRAYGAIRFDARATISSEWEAFGYFYFMVPQVEFDELEDSSILATTIAWDNSLSWTLGNAIDELKATMYQISSIVLKLQKQVCSMLMLSNSHIPSKKYWDLAVNRALQKIRSDSALIKVVLARSSRVITATDIDPIAWLACLQVEGKNAYQFCLQPPDAPTFIGNTPEQLFHRTWLDINSEALAGTRARGKSLSEDLQIELDLLSSPKDHLEFTIVRESIRKKLENVCNSVVVEPKKEIRKLPRVQHLYAKLSGRLRSEDDEFEILSSLHPSPAVCGFPTEEARVLIAETEVFDRGMYAGPVGWFGGGESEFAVGIRSALVEKGLGALIYAGTGVVEGSNASSEWDELELKISQFTKLLKLEVPLEIKN

SEQ ID NO: 94770 - protein, 486 aa, Roseiflexus castenholzii
  misc_feature (1)..(486): tr|A7NRP7|A7NRP7_ROSCS Isochorismate synthase OS=Roseif lexus castenholzii (strain DSM 13941 / HLO8) OX=383372 GN=Rcas_4216 PE=4 SV=1
MTKPFQQHYGRLISLSMPCPGVSPADLLRHARGQPRSFWESARDGVAFAGMGIAVELMAWGANRFVEIEQQARALFENAVMLDEREPLAAPRLFGGFAFHNDFVPDLAWADFPPAHFVLPHYQLVRVRDSFWLTLNVHAPPGEDPRALAPDLREALLAQVDALQSEPPPLPPRSSARLAYPMPFEQWARSVERIVRQINVGELKKVVLARIAEASFDAPVDVDSALACLAQRYPDTYRFLFEPRPGRAFFGATPELLAQVNGDRVTTMALAGSIRRGATPDEDERLALALLDSAKDRHEHQIVVDEVRNRLASLTRRLDVGATDVMRLSNIQHLHTPISGVLREPRGILPIIATLHPTPALGGEPRAAAMRLIAELEPAPRGWYAAPVGWIDRRLDGQFGVAIRSAVVQATRAWLYAGAGIVAASDPQREWDETNLKFRPMLEGLGHTDRHGLGHLVGTRIATDTTDRHGLGHTDRHGYDGSPQIK

SEQ ID NO: 94771 - protein, 395 aa, Roseomonas gilardii
  misc_feature (1)..(395): tr|A0A379N6N5|A0A379N6N5_9PROT Isochorismate synthase d hbC OS=Roseomonas gilardii subsp. rosea OX=243956 GN=dh bC PE=4 SV=1
MGDGSIPAEGVASPAASAGQAMGFAFLSGRRRLQGEGMAGLLPRGPVATLGERVREFFRAHPQAGLLAGALPFDRDALDHLTAPERVTEPAGSGASGPTASAASPAPRWSLRPEPTALAYATAVSRALEAMAVEPGLAKLVLSRCLVATAERAIDPEALLRRLDTDPAITAFLVPLPPAGDGTGRLLAGATPELLVSRQGRAVLSHPLAGSARREADPAADRAAAEALGRSGKDRREHALVAEFILDMLAPHCRKLGAPEGTTITSTRSMWHLGTRIEGELKDPGTSAADLAALLHPTPAVCGVPRDRAAERIHALEGYERDFYAGAVGWCDRAGDGSWHVSIRCAEIAGNRARLYAGAGIVPGSDPQAEARETAAKFRAMLNALGVPPGQEFDR

SEQ ID NO: 94772 - protein, 391 aa, Roseomonas mucosa
  misc_feature (1)..(391): tr|A0A379MZW4|A0A379MZW4_9PROT Isochorismate synthase d hbC OS=Roseomonas mucosa OX=207340 GN=dhbC PE=4 SV=1
MGDGSIPAEGGASPSAASAGRATGFAFLSGRRRLRGDGMAGLLPRGPAATLGERVRGFFRAQPEAPLLAGALPFDRAAPDYLTAPRRVAEPAGAAAPPDAVAPRWSLRPEPSAAVYAASVSRALEAMAAEPALAKLVLSRRLLATADRDIDPEALLRRLDTDPAVTAFLVPLPPAGGGTPRLLAGATPELLVARRGRAVLSHPLAGSARREADPAADRAAAEALGRSGKDRREHALVAEFILDMLGPHCRNLAAPEGTTVTATRSMWHLGTRIEGELKDPDTSAADLAALLHPTPAVCGVPRDRAAERIQALEGHDRDFYAGAVGWCDRDGDGAWHVSIRCAQIAGNRARLYAGAGIVPGSDPEAEARETAAKFRAMLNALGVPPGQEFDA

SEQ ID NO: 94773 - protein, 155 aa, Roseomonas sp.
  misc_feature (1)..(155): tr|A0A1Q2YYX4|A0A1Q2YYX4_9PROT Isochorismate synthase D hbC OS=Roseomonas sp. TAS13 OX=1926319 GN=dhbC PE=4 SV= 1
MAEFILDMLGPHCRNLAAPEGTTVTATRSMWHLGTRIEGELKDPDTSAADLAALLHPTPAVCGVPRDRAAERIQALEGHDRDFYAGAVGWCDRDGDGAWHVSIRCAEIAGNRARLYAGAGIVPGSDPEAEARETAAKFRAMLNALGVPPGQEFDA

SEQ ID NO: 94774 - protein, 206 aa, Rothia dentocariosa
  misc_feature (1)..(206): tr|A0A448UWV9|A0A448UWV9_9MICC Isochorismate synthase e ntC OS=Rothia dentocariosa OX=2047 GN=entC PE=4 SV=1
MPERLQIDDIPVPEHEVTLAEPTQIEGRENPGYRQAVATAVERMKAHQLDKVVLSRLLRADYAPGTLDLAGVYNNLRAQQPNTFIFSVKLPQGHRGLEYPYLMGASPELIFSTEPDTGEGSAFKTHPLAGSAPRIAEHGSAEDEALGQRLMASRKDRGEHATVIADIRAQLEPMTRQLTIPEVPSLLQTPQLWHLGTPSRVCLSRV

SEQ ID NO: 94775 - protein, 379 aa, Rothia kristinae
  misc_feature (1)..(379): tr|A0A147E8I4|A0A147E8I4_9MICC Isochorismate synthase d hbC OS=Rothia kristinae OX=37923 GN=dhbC PE=4 SV=1
MSPTLPAFCMSTPWGRVRGEDPLTGLPEAQALAAAAEHGTAVAGLLPFHPVQEPLLLVPRRWERTPAQDSRPGDPEPTAQAAALPAPRAVHGLDSPAFREVVAAAVARLHDGQLEKIVLSRLLRLDYDAAAPLDPAAVHRNLLAQHPRAYVFACRDPRAGEGQEAETPWHLGASPELVMSVRDGVCTTHPLAGSASRAGARDATEDVQIGEQLMRSPKDRGEHATVIQDIARRLDPLCEELDVPAAPSLLATPQLWHLGTRITGRLKPGVTALDAARAIHPTPAICGSPRDIALRMIEELEPHRRGFFGGLVGWCGPDGDGEWALNLRSARVGARRAVLFAGAGIVEGSTPDGEHAETGTKLSTFLAALGLDARARPVR

SEQ ID NO: 94776 - protein, 367 aa, Rothia mucilaginosa
  misc_feature (1)..(367): tr|A0A525I508|A0A525I508_9MICC Isochorismate synthase O S=Rothia mucilaginosa OX=43675 GN=DI608_00895 PE=4 SV=1
MTNLPDFIFATGTRVLRASGAMTPVTFDNALDEAKRAGSAVVGLIPFDPDMPAYLFVPERLEEQQVPVPEQTVALAEPVSVTGRQNDRFRAAVATAVERMKAGELSKIVLSRVLTARYAPGALNLEALYNNLRAQQRSAFNFAVRLPEGERGMSGSYLMGASPELVFRTEGRAFKTHPLAGSAPRIAEPGSAEDEAIRDRLFASPKDRHEHAYVINDIAKRLAPIAEELNVPQVPSLLQTPQLWHLATPIDGVLKEGLTCLDGARAIHPTPAICGAPTEKALELIRQLESFERRYFGGLVGYMDAEGNGEWALVLRCAQVSPDEAVLYAGAGIVAESDPELEHTETGTKLGSFGRALGVDTLGEDTP

SEQ ID NO: 94777 - protein, 362 aa, Rothia nasimurium
  misc_feature (1)..(362): tr|A0A4Y9F190|A0A4Y9F190_9MICC Isochorismate synthase O S=Rothia nasimurium OX=85336 GN=E4U03_10075 PE=4 SV=1
MPQLPALPSPFMLAEGTTVVRAEGALTPVAEADALSLAQCRGSAVVGLIPFDPATPAQLAVPDRWVREDIPLPTDDTVEQPAPALVEGIDSDVYRAAVAHAVELMNRGQLDKVVLARLLRVQYEQELNLPHLFDTLRAQQQRATVFSAQLPNGNYLMGASPELVFQTEGSAFRTVPLAGSAARTAAPGSTDDAQIGEALMRSAKDRAEHATVVNDIRQRLEALTLQMDVPAAPSLISTPQLWHLSTPVTGQLLPGVSSLQAARAIHPTPAICGTPTDLARDLVEELEPFDRGFFGGLMGYMDAYGQGSWYLVLRCAEVAPQEATLFAGAGIVKDSTPANEHAETATKLGTFARALGLNLGSL

SEQ ID NO: 94778 - protein, 375 aa, Rothia sp.
  misc_feature (1)..(375): tr|A0A433EB16|A0A433EB16_9MICC Isochorismate synthase O S=Rothia sp. HSID18069 OX=2419515 GN=D8M41_08555 PE=4 S V=1
MSTTLPDFMFATGTRVMRTAGSLRQVTLQQAHATAVEAGTAVVGLIPFDPDAPAHLFVPEHLQIDDIPVPEHEVTLAEPTRVQGRENPGYRQAVATAVERMKAHQLDKIVLSRLLRADYAPGALDLTGVYNNLRAQQPNTFVFSVKLPQGHRGLEHPYLMGASPELVFSTEPDTGEGSAFKTHPLAGSAPRIAERGSTEDEAIGRRLMASPKDRGEHATVIASIRAQLEPITRQLTIPEEPSLLQTPQLWHLGTPISGVLKQGMTCLDGAHAIHPTPAICGAPTEVARRMITELEPFSRDYFGGLVGYMNADGSGQWALVLRCAEVDTQTAILYAGAGIVAKSDPVLEHTETGTKLGSFGRALGINTLPEAPPAA

SEQ ID NO: 94779 - protein, 480 aa, Rubidibacter lacunae
  misc_feature (1)..(480): tr|U5DHU6|U5DHU6_9CHRO Isochorismate synthase OS=Rubidi bacter lacunae KORDI 51-2 OX=582515 GN=KR51_00034710 PE =4 SV=1
MHAVPSSVRSSSPLDLPFDLHPGSEQRAVLMAARERARRRGCPQVVVLRSELPPVDPLAVLQAAYRSDRLYGYWERRDRHHAIAAFGAAASATFATVRRFVQVREFVERWRARLLASEEASTPKFFCSFAFAAAPPASVPPPLFPAATVFLPHHQLERCGERVELTTHLVLSPQNDLDALWANYCRDLRAIACIRSEVVPTPILPAQWLQHRESRPERFTAGVSGALEAIAAEQLEKVVLARSLEVVAPLPLNPFASLDFLRRQHPDCFAFAVGNGRNAHFIGASPERLLSARDRHLVSDALAGSAPRGATPAEDARLAAALLASDKEQREHALVREFICLRLRQLGLSPQMGPLQLMQLANIQHLWTPVRALADTGHSIFDILSHLHPTPAVAGLPRARACDYIQSSEAGDRSLYAGPLGWADGNGNAEFVVGIRSAEVVGARARLCAGAGIVAGSDPQAELAEVQLKWQAMLRALGRT

SEQ ID NO: 94780 - protein, 427 aa, Rubrivivax gelatinosus
  misc_feature (1)..(427): tr|I0HLY1|I0HLY1_RUBGI Isochorismate synthase MenF OS=R ubrivivax gelatinosus (strain NBRC 100245 / IL144) OX=9 83917 GN=menF PE=4 SV=1
MNLALPPGHPLRLCSAALEIAPLPPERLLAVQGEPTAAFMAPNGESWVGIGAVRWLTGRPGDGHALWAGVADVSPDAPPPTALGVLPFSPHEAPDELWAGLLPGGVVLPERLVVQRGGRAWLRLTLPAAEADTLRSRLASVARELAALPPTESQALPDFEEFDDAETAARYTAAVGDAVARIRAGELVKVVLARRARIAFGAVPSAAAVMRRLSAHQSGAVRYAWCRGGKAWLGATPETLLRLDGRTLRTEALAGTRPESRAEELYADAKERHEHAVVVDAVRAAIAPWVQALPPTRAPGLRRTRGLAHLHTPIEATLSAAPDALALVHALHPTPAVCGLPADRAATLLAALEGEARGLYAGPVLRLSADGTAHAVVGLRGALLAGRLAVLPAGAGIVDGSDGERELAETRAKQGSVLDAWRAFVAA

SEQ ID NO: 94781 - protein, 400 aa, Rubrivivax sp.
  misc_feature (1)..(400): tr|A0A519GF05|A0A519GF05_9BURK Isochorismate synthase O S=Rubrivivax sp. OX=50259 GN=EOP38_01135 PE=4 SV=1
MATNGQWPLQPPTAESLLRLYREGDSAFVSPACSVLTRGAYAQLDIPALSQLPSRAATLLDEVARDGEVEPLLIGAVAFGERVPPRLIVPEGVIMGAGVKDGSPHGVRASALPGERVAGLNLPSAARYRSNVEEALRCIAAGQFEKVVLSRAMRVQAQVQARRLMQLLLPRNVLGYTFAVDLGVRAGQGATALVGASPELLLSKRGRHVVSHPLAGSVPRAQDPVEDQARAARLLSSLKDQREHTYVVDAVAQALAPHCRKLLVPPKPSLVATATMWHLGTRITGDLDDPEASALALAMALHPTPAVCGHPRRAAQDFIQRVEGFERDYFAGLVGWVNGQGDGEWAVTIRCAEVAEQHATLYAGAGIVMGSDPALELAETEAKMQTMLSAMNVALRKEAA

SEQ ID NO: 94782 - protein, 507 aa, Rubrobacter radiotolerans
  misc_feature (1)..(507): tr|A0A023X6D1|A0A023X6D1_9ACTN Isochorismate synthase M enF OS=Rubrobacter radiotolerans OX=42256 GN=menF PE=3 SV=1
MIGHGHTASEGFSASSEAAGPVRPVRELAGLVRELLLRPESRGGERRAVRLAVEFSAGAGEVPSLETPLGWLFSLKNRTEAQLFPKVYWSGREAARRGGRESAAVGAAHRADGLQATLLAAADSPETRYYGGLRFDSGYPEERRDARWSGFGDGSFVLPRVELSRDDGLCVLSCNLVLPDDAKYAESLPAFVEGLMAEDPAGPDGAAPRLVARRDRPDFEGWSREVERAVEEFRERPGKVVFARRADLDFDGDLDALSLLGSLKAATPGCFHFYFEPEPGGAAFIGATPERLYGREGRAVRSEAVAGTRPRGASAADDDGLLEELLGSEKDRAEQRYVRDSIERDLRKLCAALTVEEGVSEMKLASRRHLVSRFRGTLAEGVTDADVIRALHPTPAVGGYPKGEAILRLRDSEPFDRGWYAGPVGWLSRDAAELAVGIRSGLVGGSRLSLFSGAGIVAGSTPGGEWAEIEQKISDFILVLGDGESSGAAPAVALPHDAPDSLERATG

SEQ ID NO: 94783 - protein, 466 aa, Rubrobacter xylanophilus
  misc_feature (1)..(466): tr|A0A510HJK9|A0A510HJK9_9ACTN Isochorismate synthase M enF OS=Rubrobacter xylanophilus OX=49319 GN=menF PE=3 S V=1
MLRREARPGNARWRLAGEVSRALSGVRLEEGGAEERVVRLSVPVGEVDPLLWLAAQRPGCRMYWSARGGGFEVAAAGEADVLAGGPGEYPAALRKRQGLLLAGDGGTRYYGGARFDAARESDSGWAPFGAYRFVLPRFELRVREEMRELACNLVLPRDVGRQDEILAWLEALPFPSEEVGPSAFPAPLRRLDTPRLSGWRSGVGRALGAFREGRMGKVVLARRVDFDFEGPLDAPALARALRDVTPGCFHFYLEPEEGVAFLGASPERLYRREGRSVTSEAVAGTRPRGGSEADDRALGGELLGSEKDREEHAYVLRSIREELGSLCESLRVDGDVSEMRLATRRHLVARLRGILHPGVTDADLLEALHPTPAVGGYPREAALAEIRSSEPFDRGWYAGPVGWIGAGGAEFAVGIRSGLVRGSRLALFSGAGIVRGSDPEEEWAEIEQKISDFAGILGLEGRDASG

SEQ ID NO: 94784 - protein, 450 aa, Ruminiclostridium cellobioparum
  misc_feature (1)..(450): tr|S0FN61|S0FN61_RUMCE Salicylate synthase OS=Ruminiclo stridium cellobioparum subsp. termitidis CT1112 OX=1195 236 GN=CTER_0841 PE=4 SV=1
MRKYYEKNIPNESRNTVYETAAHLCSGEEDNVYLYENNDCVSVGAGIYSEIIVTAEEIVIKRKSAGQSIKVSDLCRDLDNLFKSLEVDSWRAYGIANFGLARYIYGLDVGTETGELLHLIIPDREYRIDKETILLRALNEDDLKTMEKNISNVFLNGVREENVTFYNGKEVLIFDEEYYKNIVGLAVKEIENKEYQKVILSRKIPVHSRLDMLQTYMHGRHKNTPARSYFYSFPNLEVTGFSPETIAEVDASGTVYTFPLAGTRALTEDSKINKNLKKELLQDPKEIAEHAISVKLADEELEQVCVPGSVAVTEFMSVMERGTVQHLGSRLRGKLRAEYNPWHAFFKLFPAVTASGIPKKEAIEAIGRIEKDARDLYSGGVLTYDSNGTLDAALVLRSIFQNEEETWVRVGAGIVEMSNPERELAETREKISSIAGQLVEEQQRYIQLSV

SEQ ID NO: 94785 - protein, 489 aa, Ruminiclostridium hungatei
  misc_feature (1)..(489): tr|A0A1V4SM11|A0A1V4SM11_RUMHU Isochorismate synthase/i sochorismate lyase OS=Ruminiclostridium hungatei OX=482 56 GN=mbtI PE=4 SV=1
MKERTKVERNFEANKNVAPIPCRDFHGVLCEMGGMEILMKKYYEKYISNRSGMAIYELAGHICGGERDNCYLYENKDVVSVGIGIHKEIIASPEEIVIQGEYAKQSVRVSELRQDIDKVFRSMDVDGWRAYGIANFGLARHIYGMDLGAEAKELLHFVIPDREYRVKKDIILLRALNEEALKSMESNVRSAAERCGKEEPFSYYDGKEVLSFDRDYYMDIVRLAVQEIKDREYQKVILSRKIPVLNRLDMLKTYIHGRSGNTPARSYLYRFSNLEVAGFSPETVAEVDASGTVYTFPLAGTRALTGDSTTDKSLREELLNDPKENAEHAISVKLADEELEQVCVPDSVVVTEFMKVIERGTVQHLGSRLRGKLCEGNNTWHAFFKLFPAVTASGIPKKEAIEAIGRIEKDPRNLYSGSVMTYDWDGTLDAALVLRSVFQNQEGAWVRVGAGIVEMSNPERELAETREKVGCISGQLVKELQQQYVHVSV

SEQ ID NO: 94786 - protein, 421 aa, Ruminococcus sp.
  misc_feature (1)..(421): tr|A0A3A9DKS1|A0A3A9DKS1_9FIRM Isochorismate synthase ( Fragment) OS=Ruminococcus sp. 1xD21-23 OX=2320089 GN=D7 W80_32635 PE=4 SV=1
MTRIYTCNIPIEADLVDAFCALQKGFTDQFVYYDKARPCRYMGLGRCIALPSLREVEWVHGEGAEARAPRGVGDGFGAGSGAAPDGAALEGAAQPPVFFSFNRFDATNSAPADELMASFPRLRFMLPEIVLMENERGRFLQVNSLGPVYPGRVARFQRLVAAAPRRRAEAIPFTLVPDSRAVWDAEMEEALAAIAAGRVSKVVLSRRQRLVAARPFSSKDLLVNLIDGDARGTVLLYRYADVFFCGCTPELLVRKQGDRVESMCLAGTCPAGATDVESEALAAALMADGKNRAEHDYVVRLIRSVLERVCYDVDVPATPQIMRLAHVQHLFTPAAARVLAGVTLADLMEDLHPTPAVAGTPVGEAKMLLRAIEPYNRGFFAGACGFVDGAGDGEFSVALRTGVFDGEVGWVYGGCGIVVGS

SEQ ID NO: 94787 - protein, 462 aa, Rummeliibacillus sp.
  misc_feature (1)..(462): tr|A0A3N5ZRH5|A0A3N5ZRH5_9BACL Isochorismate synthase O S=Rummeliibacillus sp. TYF005 OX=2058214 GN=CW357_13900 PE=4 SV=1
MNRKLSTTTGDQIETETEKSTLKFFTETIEVNRLSALAFFEAGEESFANQRYYWQNREKTFTLVGLGYAHIITSHSTDQRFDDVEQQWKKLTQHIVTNDKELQPILFGGFTFDPENGVSGEWEGMPPAFFVVATYQLVIRNDHVYISTNYIAEQENPQILNELCKKRDELMHTAQVKALKTYAKPKVKSSFEPFKEEYLESIHQVTSLIRQKEADKVVIARSLALEFEKEVSSPNVLSQIILEQPESYLFGLEHNEKLFFGASPERLVKVENSYAYSSCVAGSVKRGKTAEEDEGLGQSLLNDAKNRSEHQYVVDMIGHTFKENCASYTIPSEPRLLKIRDIQHLYTPVEGHLKNGATILQLVKTLHPTPALGGVPRMKAMEVIRKYEPMNRGLYAAPIGWLDANGNGEFAVAIRSALLHQDKAYLYAGGGIVADSQPQSEYEETLVKFRPMIRALGGQLHE

SEQ ID NO: 94788 - protein, 412 aa, Runella sp.
  misc_feature (1)..(412): tr|A0A3G3GPD9|A0A3G3GPD9_9BACT Isochorismate synthase O S=Runella sp. SP2 OX=2268026 GN=DTQ70_14565 PE=4 SV=1
MMSDKLETTGASSLFDHGLHPLSAWQSTRELGFAAALWRLPHQKDKHLIVNFGSELPRTRMTLDELPAGFAMSPFLNIEGDSSLFIEADLYFRFDEHGDVTLEKESAFLSGSNREKWYNHYRNRPTNASPLVAHSVSSRQPELPSFVYLDAVQKAVKAIEAGEFKKVVFSRVKQVELATDFTFSEVFERLCEKYPTAFVSMVYLPQLDQVWLGATPETLVSVDKQGIFRTVSLAGTQSAFDASGAPISVKKAAWTQKEIEEQALVGRYIISCFKKIRVREYLEEGPKTVVAGNLMHLRSDYLVDTKTINFPELGTVMLELLHPTSAVCGMPKMEALAFIQQHEGYDREFYSGYLGPVNVGNETHLFVNLRCMKIQNNVATLYAGGGITEDSEPEKEWQETEMKCQTMLSVLG

SEQ ID NO: 94789 - protein, 389 aa, Saccharomonospora sp.
  misc_feature (1)..(389): tr|A0A4P7CDZ7|A0A4P7CDZ7_9PSEU Isochorismate synthase D hbC OS=Saccharomonospora sp. 31sw OX=2528243 GN=dhbC PE =4 SV=1
MTERSPVDLLAAYRRGDFFLATENRTMLGRGIYTAVSDADEFALAERVRTLLLGKAEEQSGPDEADLVAVGALPFDSDATTPGHVVVPENVHVAGALHPAAAALPRHEVPRPVAIRPVPEPSRHVEAVATAVTALAERNLRKVVLARALDVEFAGPVGPEGILHNLVVDNDRGYTFAAELPNARTLVGASPELLLSRRGRTVVSHPHAGSAPRSADPTIDRENAESLLASRKDHIEHAVLTEAIVETLRPYCARLDVPPRPALVSTPTMWHLGTTITGELSDPGVTALHLAAALHPTPAICGTPTPSARRLVTELEEFDRGYYAGAVGWVDAQGDGEWAVSIRCAELAEQSLRLYAGGGIVPESDPKAELAETSAKFATLLRAMGLPQE

SEQ ID NO: 94790 - protein, 385 aa, Saccharopolyspora erythraea
  misc_feature (1)..(385): tr|A4FPU9|A4FPU9_SACEN Isochorismate mutase OS=Saccharo polyspora erythraea (strain ATCC 11635 / DSM 40517 / JC M 4748 / NBRC 13426 / NCIMB 8594 / NRRL 2338) OX=405948 GN=menF PE=4 SV=1
MSWVRDGDGLVGWGCAARLDTSGTERFVEADAWWQDWAEQVEVHDEVGLPGTGPVAFTSMAFAEEPGRSVLVVPEVLVGQRDGVRWVTTVGEPAAARPPEPVAHPGMVRYSDGQLSATGYRQAVADAVRRMREVGDLDKIVLAHDLLACTSDPLDGRFLLNNLAARYPSCWTFSVDGLVGATPELLLERTGQLVRSRVLAGTIWPREGRGADELAAELLASGKDRSEHDYAASSLATCLSPFCTELTVPEEPSVLRLRNVMHLASDVSGVLSGSQATLLRMTDAVHPTAAVGGTPTPQAVKLIHELEGMDRDRYAGPVGWVDARGNGEFGVALRCAQIQSAPEDREGRVRLFAGCGIVADSDPDLEVAEAEAKLLPMREALEGIA

SEQ ID NO: 94791 - protein, 409 aa, Saccharopolyspora rectivirgula
  misc_feature (1)..(409): tr|A0A073AW39|A0A073AW39_9PSEU Isochorismate synthase O S=Saccharopolyspora rectivirgula OX=28042 GN=GU90_13755 PE=4 SV=1
MDSDTEDLDVVPDDAALRLLEDYEAGSSFYFSSPRGAVLARGVEAVVPKVRCGKAGLPQKVAEFLAGARGFNRPDPMVVGAVPFGENLPAHLVLPSEVVRAEPLRTTGESVRSVNAPECAVQPVPLPEEYERGVQRVLRRIADGEMSKIVLARSLQLTAQQPIEIQDVLRNLATTDPSGYTFAVDLPRRGEDGIRDPRGPHPEFARTFLGASPELLVSRFGGRVRANPMAGSRPRSTDPVEDQRRAAELSTSDKDLREHAAVVDAVVEQLRPFCSELDVQPRPSVISTAAMWHLATEITGRLKSTDTTSLELAAALHPTPAVCGTPVDQARKVIAEIEPFDRGYYAGMVGWCDASGDGEWVVAIRCAEIEDEVLRLFAGAGIVEGSDPASELAETTAKFRTALSAMGLE

SEQ ID NO: 94792 - protein, 508 aa, Saccharopolyspora sp.
  misc_feature (1)..(508): tr|A0A4R4Y9J4|A0A4R4Y9J4_9PSEU Isochorismate synthase O S=Saccharopolyspora sp. 7K502 OX=2530387 GN=E1288_33325 PE=4 SV=1
MSRPNTSTPRAARARPRRRGGTATDWSPSVLVSVTESAAFCATASLATVTDCRHPVDGHAHAFGAAHLLESDAYPPGVATTPRLLTARTRRLEAGDPRYDSPLLELLPTDAVLSWVRDGSGLVGWGCAARLDVAGPDRFNRADDWWRELCHQFEVDDSVGLPGCGPVAFASLAFADDPGHSVLIVPEVVIGQRDGVRWITTIGDGSTEQQPVEPVHPPGTVSYSDGQLSATGYRQAVAEAVHRMRQTGDLDKIVLAHDLLASTSEPLDARFLLNNLAARYPTCWTFAVDGLVGATPELLLEREGYEVRSQVLAGTVWPREGHTTEQLAAELMASAKNRSEHAYAAESLAVRLRPFCSDLTVQNEPEVLRLRNVLHLATNVEGKLSESGTRNGATLLRMVAAVHPTAAVGGTPTDDAVQAISELEGMDRGRYAGPVGWLDGSGNGEFAVALRCAQVETAAAPGTEAERGGGRIRLFAGCGIVPESDPDQEVAEAEAKLLPVREALEGVR

SEQ ID NO: 94793 - protein, 365 aa, Saccharothrix espanaensis
  misc_feature (1)..(365): tr|K0JXD9|K0JXD9_SACES Isochorismatase hydrolase OS=Sac charothrix espanaensis (strain ATCC 51144 / DSM 44229 / JCM 9112 / NBRC 15066 / NRRL 15764) OX=1179773 GN=BN6_ 27000 PE=4 SV=1
MLAAETSSALPGLDTYREGGFFFASPTGVLVAEQAGAAHVAPLEPGEVVVGAVPFRPDVASRLTVPGAVRRGAPLHTVSFPDRPTPGGRWLDQRTDADAYTSGVQRALDLMADGALSKVVLARALDLTSAERIDVRQVLAALAARDPRGYTFATDLGGSTLIGTSPELLIRRTGPAVVSNPLAGSRPRSADPEQDGRNATELLASPKDLREHAFVVGAVADALAPFCRELIVPATPELLPTRTMWHLSTKVTGVLRDESTSALDLASALHPTPAVCGVPADTARNLIGELEPFDRGFYTGLVGWTDERGDGEWIVALRCGEVADRTLRLYAGAGVVPGSTPEAELAETSAKFRTFLGALGLKESA

SEQ ID NO: 94794 - protein, 444 aa, Salarchaeum sp.
  misc_feature (1)..(444): tr|A0A518SCW3|A0A518SCW3_9EURY Isochorismate synthase O S=Salarchaeum sp. JOR-1 OX=2599399 GN=FQU85_10115 PE=4 SV=1
MGTRRNAQESVPAGGRLVSRTRRLDDTPLAALVRTAERPHAVWTAPDEPALLARGAAAFVTASGTDRFASVREQAATVFASIDRPDAAPRAARPRFVGGFSFHDRHDATGVWDGFPGAGFVLPHVQFTATGDTTYLTVNEYGADATPASVNRTLDTVAADARDATRGELDAPPGVRETERTTDRETWRDQVEQVVERIDSGDLEKAVLAQSLRAELDGAFSLPDAFDRLGDAYPDCFRFAFRANGGRTFFGATPERLVTRHGGRLETGALASTVPRGDTPAEDDALEADLSSSEKYQHEHQLVADSIRAQLDGHARNVVTGDQQVRKLATVQHLFTPISADTDEHVLDLVAALHPTPAVGGLPPDAALDAIREIETFDRGWYAAPVGWFDANGDGTFAVAIRSAVADDRAATLFAGNGIVADSDPDAEWEEVLLKYRPVLDALE

SEQ ID NO: 94795 - protein, 464 aa, Salimicrobium flavidum
  misc_feature (1)..(464): tr|A0A1N7J3S4|A0A1N7J3S4_9BACI Isochorismate synthase M enF OS=Salimicrobium flavidum OX=570947 GN=menF PE=3 SV =1
MLQVKTFHIEDKLRKVHEEAVGKNLSLLMSATEKIEGVDPLSFFDQGKRIDEHRHFWKSAEEDFTLVGIGSAISISKEGQGRFQETDKELSEWRNNVRQWNPYDKKGTGTVALGGFGFRPDSTAEEPWEEFPNSNMTIPEFLLTSDEAGSFLTTNLLIHPDDDIEAVIQKSEEDKRKLCTSYSDEHAPVHLEKIEEVRPEEWKRTIAEATEKLADGTLSKVVLAREVRLTFDSAASITKVLQDLSSMQNSSYVFAFEHKGAYFVGATPERLVKVENDELFSACLAGTTPRGDSEEEDERLGCELLGDHKNRLEHDFVVQMIRGAVETYAQDVDIPETPLLYKLRNLQHLYTPVRASLKEGFSLLDVVKDLHPTPALGGLPQQQAVDYIENHELMNRGWYAGPIGWIDGGRNGEFAVAIRSALIRGNKASLFAGCGVVKDSQPEAEYEETKVKLKPMLAVLGGEE

SEQ ID NO: 94796 - protein, 464 aa, Salimicrobium halophilum
  misc_feature (1)..(464): tr|A0A1G8VBU2|A0A1G8VBU2_9BACI Isochorismate synthase M enF OS=Salimicrobium halophilum OX=86666 GN=menF PE=3 S V=1
MLQVKTFHIEDKIRKVHKEAQRTRQSLLLSVTEKIEGMDPFAFFESGKQIDEHRHFWKSADEDFTLVGISSAVSITKEGEDRFPAMEKDLLGWMNRVRSWNPSDKKGTGAVALGGFGFCEVSVAGEPWETFPNSNMTIPKFLLTNDREGSYLTTNLLLTPEEDVEEISMSVEEEKERLLHPVEEEGVSVRLEEIEEVRPEEWKQTIAEATEDLTKGSLRKVVLAREVRLTFDAPASITKVLQDLSEMQNASYVFCYEHGGAYFVGATPERLVKVEHDELFSACLAGTTLRGDTEDEDDELGDELLQDEKNRVEHDYVVQMIRSAVEQYAEEVDVPEGPSLYKLRNLQHLYTPVKARLKEGYSLLDVVKDLHPTPALGGLPQQEAVEYIKNHEEMNRGWYASPIGWIDGGRNGEFAVAIRSALLHDNKASLFAGCGVVESSDPESEYEETMVKFKPMLAVLGGKE

SEQ ID NO: 94797 - protein, 466 aa, Salimicrobium jeotgali
  misc_feature (1)..(466): tr|K2HBX7|K2HBX7_9BACI Isochorismate synthase MenF OS=S alimicrobium jeotgali OX=1230341 GN=menF PE=3 SV=1
MLQVKTFQTEDKLRNVHEEARMNDEPLLMSITERIDPLDPFSFFEQGKQVDMHRHFWKSAEEDFTLVGIGSAVRISKEGEGRFQESEQELFDWRKSVRQWNPYNKKGTGTVALGGFGFRPESGGEEPWQEFPNSSMTIPEFLLTNDAEGSFLTTNYLVSPEEDVETIICRMEEDKERLQTSDSSGDTETGVRLEKIEEVRPKEWKQSIADATAELKAGTLSKVVLAREVRLTFDSEASITKVLKDLSDMQNSSYVFAFEHGGSYFVGATPERLVKVEDDELFSACLAGTTKRGSSEEEDETLGLALLNDQKNRLEHDYVVQMIRGAVENYSVNVEIPEAPSLYKLRNLQHLYTPVKAKLKEGYSLLDVVKDLHPTPALGGLPQKEAVTYISLHEVMNRGWYASPVGWIDGGRNGEFAVAIRSALIRGDKASLFAGCGVVEDSKPEEEYEETKVKLKPMLAVLGGEE

SEQ ID NO: 94798 - protein, 466 aa, Salimicrobium salexigens
  misc_feature (1)..(466): tr|A0A1N7LG82|A0A1N7LG82_9BACI Isochorismate synthase M enF OS=Salimicrobium salexigens OX=908941 GN=menF PE=3 SV=1
MLQVKTFQTEDKLRNVHEEARMNDEPLLMSITERIDPLDPFSFFEQGKQVDMHRHFWKSAEEDFTLVGIGSAVRISKEGEGRFQETEQELFDWRKSVRQWNPYNKKGTGTVALGGFGFRPESGGEEPWQEFPNSSMTIPEFLLTNDAEGSFLTTNYLVSPEEDVETIICRMEEDKERLQTSDSSGDTETGVRLEKIEEVRPKEWKQSIADATAELKAGTLSKVVLAREVRLTFDSEASITKVLKDLSDMQNSSYVFAFEHGGSYFVGATPERLVKVEDDELFSACLAGTTKRGSSEEEDETLGLALLNDQKNRLEHDYVVQMIRGAVENYSVNVEIPEAPSLYKLRNLQHLYTPVKAKLKEGYSLLDVVKDLHPTPALGGLPQKEAVTYISLHEVMNRGWYASPVGWIDGGRNGEFAVAIRSALIRGDKASLFAGCGVVEDSKPEEEYEETKVKLKPMLAVLGGEE

SEQ ID NO: 94799 - protein, 466 aa, Salimicrobium sp.
  misc_feature (1)..(466): tr|A0A2A3A9X7|A0A2A3A9X7_9BACI Isochorismate synthase M enF OS=Salimicrobium sp. WN024 OX=2029857 GN=menF PE=3 SV=1
MLQVKTFQTEDKLRNVHEEARMNNVPLLMSITEKIDQLDPFSFFEQGKQVDMHRHFWKSADEDFTLVGIGSAVRISKEGEGRFQETEQELFDWRKSVRQWNPYNKKGTGTVALGGFGFRPESGGEEPWQEFPNSSMTIPEFLLTNDAEGSFLTTNYLVSPEEDVETIICRMEEDKERLQTSDSSGDTESGVRLQKIEEVRPEEWKQSIADATAELKAGTLSKVVLAREVRLTFDSEASITKVLKDLSDMQNSSYVFAFEQGGSYFVGATPERLVKVEDDELFSACLAGTTKRGSSEEEDETLGLALLNDQKNRLEHDYVVQMIRSAVEDYSVNVAIPEAPSLYKLRNLQHLYTPVKAKLKEGYSLLDVVKDLHPTPALGGLPQKEAVTYISRHEVMNRGWYASPVGWIDGGRNGEFAVAIRSALIRGDKASLFAGCGVVEDSKPEEEYEETKVKLKPMLAVLGGEE

SEQ ID NO: 94800 - protein, 469 aa, Salinibacillus kushneri
  misc_feature (1)..(469): tr|A0A1H9Y5V7|A0A1H9Y5V7_9BACI Isochorismate synthase M enF OS=Salinibacillus kushneri OX=237682 GN=menF PE=3 S V=1
MIQTKQQRFTESINEAIGQRAHEDTPQLFSYTEKIAGVDQISPIAVFQNTQSFKGSRIFWTSPEDEVTLIGLGSVYSFNGTEDTNSNRFKQVHSNWKKMLNSIYVDNPYKHPGTGPVFMGGFSFNPEESSQLWRNYSNTQMTLPEYLITIDKNEAFLTYHVWLDKELDIEDSSCAFVKMLETIKRETKHAHNPLAIMNQQAINADEWKRTVKKATGTIENNVMEKVVLARELRVSFNRNIPVSYVLENLLEQQKQSYIFAIESEDDCFIGATPERLVKVENRHLLSTCLAGTSPRGKTLKEDERLGKQLLDDDKNRMEHAFVVDMIKQAVEACSVKVQVPESPVLYKLRNLQHLYTPVQGVLKEGHSILEVVRRLHPTPAMGGVPRDKALTFIQQEENLSRGWYSAPIGWMDAMDNGEFAVAIRSGLIQGDEASLFAGCGIVRDSDAEKEFQETEIKFLPMLMALGGLQ

SEQ ID NO: 94801 - protein, 567 aa, Salinibacter ruber
  misc_feature (1)..(567): tr|D5H8W0|D5H8W0_SALRM Isochorismate synthase MenF OS=S alinibacter ruber (strain M8) OX=761659 GN=menF PE=3 SV =1
MAGTCACCSRPSSTRAGWSTCPNSTTPTPASIRWSTSGGRHGPSGSTARPTSQGTVPRPLPSRSATPHGRRREGPPPPAPPLHPRPVFLTHTSMLDLDPTVIRDIEGADDVRAALADRIRDATRSSAARTVRVSVPVPGRMRPIDWVRARSSAEAVYWSGRDEDRTVAACGTADVVSGSTAPVDYQALGRVLDERLDGADSGVRYYGGMRFDAGQPTAPNRPDGRWAPFGTYRFVLPRFELVEADGTLRLVCTLVLPRDAERVDEIVDALGAVALPVPSEHTALPRPHQRQDVPGHGEWTDMVRWALDAIDGGSLDKVVLARRVALSLGAPMDPLLVLSHLEPATPGCYHFAVRPSRGAAFVGASPERLFRRAGRTVVSEAVAGTRPRGETAAEDARLRQELLQSPKERREHAFVRDAIRDDLDRVCREVRIPKKRGELALSRGRHLHARITGTLRPDTGTTDVLEALHPTPAVGGVPTDDAVAAIRAREPFDRGWYAGPVGWVGRDAAEFAVGLRAGLVEEAQMALFSGAGIVEGSAPDREWDEIEQKIGDFAAIMGVSDPRMASR

SEQ ID NO: 94802 - protein, 497 aa, Salinibacter sp.
  misc_feature (1)..(497): tr|A0A2P6BXQ2|A0A2P6BXQ2_9BACT Isochorismate synthase M enF OS=Salinibacter sp. 10B OX=1923971 GN=menF PE=3 SV= 1
MPNLDSPFVHDRNADSPSEHLADRIRAACADRSNGAERTVQVQVPVTDNANLLEWLRGRENEEQVFWAPRSPETTSFSPSGNGHSEAKTSASRPAVAATGTADVLTGTRQPMEYDRLQRALNDRFRTAAAPVRYYGGLRFDAPQSRTTENPECPWRPFGTYRFVLPRFELRRAPDGVSLACNLVFPRDAGRAETLIEQARVLSIPTREASPSLPKPLGRTDAPEKEEWTRMVQWALSAISDHALDKVVLARKVALELERTLTPLDVLQHLKAATPGCFHFALSPAGGPAFLGASPERLFRQEGRQVVSEAVAGTGERGDTPSADAALWEELLNSPKERREHAFVQNAIRNVLDRLCSSVEVPDTPSELRLARGRHLHARLSGRLRAEVATTDLLDRLHPTPAVGGVPTDQALTAIRTQEPFDRGWYAGPVGWVGPEAAEFAVAIRSGLAEEEKLTLYSGAGIVEGSVPAREWEEIEQKIGDFAAVMGLGARVKDPSR

SEQ ID NO: 94803 - protein, 415 aa, Salinibacterium sp.
  misc_feature (1)..(415): tr|A0A5B9G679|A0A5B9G679_9MICO Isochorismate synthase O S=Salinibacterium sp. dk2585 OX=2603292 GN=FVA74_12775 PE=4 SV=1
MPALTVETVAIDNPGPLVSLLDRQQPLLWRRRGFGITGHGVAARFEFSGEQRMTDAAATWRAVADAATITDPLALPGTGLVAFGSFSFSPGSAHASRLVVPAFVVGRAEEHFWLTRITVGPAPVEPLTAAMLPRVEAATSAAHASFADGALSSEGYLGIVRDGIGAIRDGRLSKVVLARDLAARLEAGADLRPTIAALAESYPDCWTFAIDGFIGSSPETLVSVHDGVATARVLAGSAARGTDATSDDEAATTLATSPKDQDEHEFAVQSVLASLRPHSRGVVASEVPFTLRLPNVWHLASDVEGVLDDGSTSLDLIRALHPTAAVAGTPTPDAMALIEELEPFDRGPYAGPVGWVGADGDGEWAIALRSARVDSDGTVTAWAGAGIVADSDPERELLETRMKFKPIVDAFDPVG

SEQ ID NO: 94804 - protein, 454 aa, Salinicoccus sp.
  misc_feature (1)..(454): tr|A0A558AZS8|A0A558AZS8_9STAP Isochorismate synthase O S=Salinicoccus sp. CT19 OX=2493691 GN=FO441_05760 PE=4 SV=1
MNLEAYQNILDDVRLDSESTYLSLQLPTHGYDLDEQKIFSYFHESQGARYWFRSKDDRYNTIGIEYLESIRRDKYSAKALSVQKSSLYGKIQQVPLEADMQSSLSLFGGTRFDSKDTSDEWNDFAMVDFHLPKWQFDLANKELFYSVRLETVDIASVLTEISRELENISAVTKSTFEAPQINMEKDIFPEEWKALVDQAVDILDDRDFRKVVLARQRLLTFKSQVDPLFLLKRLNDEADTYTIYYEKGKSLFISKSPEKLFDIRSNTLTTNAIAGSSERTGEAAKDEGQKAFLLKDEKNRYEHELVRESIVEDLKPYTDRVEFTAEPDVLENKYIYHLHTPISAELTDETSVFELLDAIHPTPAVGGMPKDRAREYIMQEEHGTRGLYAAPIGIIHEDNESEFVVAIRSMLLHANSATLFAGCGIVKGSSSEKEFEETRVKFTPMLNVLGVETR

SEQ ID NO: 94805 - protein, 162 aa, Salinisphaera shabanensis
  misc_feature (1)..(162): tr|F7Q4C8|F7Q4C8_9GAMM Menaquinone-specific isochorisma te synthase protein OS=Salinisphaera shabanensis E1L3A OX=1033802 GN=SSPSH_003737 PE=4 SV=1
MSGTANPAQSSGPARDAATDIQRWQTLLESIPYARHLGLEIVPDSTGVQVHLPFREALVGNVMLPALHGGVLGALIEITARIAAQGEDAMECRPRILDCNVDYLRSARTQSTFASAEIVRRGRRVVLVRVTCWQDRITAPVASARVQLLLDTVSAANPKEAR

SEQ ID NO: 94806 - protein, 407 aa, Salinivibrio kushneri
  misc_feature (1)..(407): tr|A0A4P8H6X3|A0A4P8H6X3_9GAMM Isochorismate synthase O S=Salinivibrio kushneri OX=1908198 GN=FCN78_09390 PE=4 SV=1
MAFTWPGDLSPVAWLDAQPVYPKTYWQSRDGREEVLVLGAGRQFSQLSAAQASLLPDQRIWGCVAFDDAPGYGDFFLPVVELIRRDQQWHLSVNLTEACDSQALLNQIIWQGRPLAAQHAVVREETHTPSRAQWCQSVRCALTHMEQTALQKVVLARQTRLSLNAPISAGQLLQHSQQHNVESFHFLFATGPDDAFVGSTPERLYRRRDCRVTTEAVAGTVRRGASFSDDHRLGEWLLRDTKNVHENQLVVDDIFAGLRRHALTITVDPEPHLIVLRHLQHLRRRISAIIGPGVDDAVLLSALQPTAAVAGLPRENARTFLAEQGIARGRYSGAVGYLSQRESQFCVAIRSAQVTENTVDLYAGAGIVPGSDPDAEWEELDNKLTTLRQCLPACTMPEKDAIRLGAC

SEQ ID NO: 94807 - protein, 460 aa, Saliterribacillus persicus
  misc_feature (1)..(460): tr|A0A368XG07|A0A368XG07_9BACI Isochorismate synthase M enF OS=Saliterribacillus persicus OX=930114 GN=menF PE= 3 SV=1
MIETKEKHIDGVLKAARSQATRMHAPTFVSVTNEIDTVDPLGFFQAGKNIDGNRVFWSSATENKSFIGVGKAYTLKAKETSYASVRKQWEELLEHAIIDNAYPLTTPKAFGGFTFDEKMTSTNTDWKEFQGSQFLVPAYVLTMEDDHFYLTINCIVDTTTSLEILSKQISEDTKMLARANFIQEPLSTIENRYEEDPKDWMELVKQATRTIKTSTVDKIVLARELLLDFKNTVDITVVLHHLLQAQSNSYVFAFDSMESSFIGATPERLVRVENQSVLSACLAGTAKRGQTDFEDALIGDRLLHDDKNLHEHQFVVDMIREAISAVSTTMEIPDRPVLYPLKNLQHLYTPVKAELKSSYGILDVVEKLHPTPALAGYPREEAMQFIRSYESLDRGWYGAPIGWFDQDFNGEFAVAIRSALINDTKATLFAGCGVVKDSNSLKEYEETNIKFTPMLSALGG

SEQ ID NO: 94808 - protein, 431 aa, Salmonella abony
  misc_feature (1)..(431): tr|A0A5J0DV61|A0A5J0DV61_SALAB Isochorismate synthase M enF OS=Salmonella abony OX=29482 GN=menF PE=4 SV=1
MHSITTALENLTRQLSQEIPATPGLCVFDAPFPLNDAFDALSWLASQSSFPQFYWQQRNGDEEAAVLGAITVFSSLDLAQRFLRQHAQPDLRIWGLNAFEPKEGYLLLPRLEWRRSGGTATLRLHLHSDVSLRDDARQAKAFLASLVGIKPVPALRLSLTSEQHWPDKDGWVKLIQQATHTIAQEAFDKVVLARATDLQFSRPVNAAAMMASSRRLNLNCYHFFMAFSADTAFLGSSPERLWRRRETALRTEALAGTVANHPDNHKAWQLGEWLMKDDKNQRENMLVVEDICQRLQNCTHSLDVLPPQVLRLRKVQHLRRCIWTALNQADDTLCLHQLQPTAAVAGIPREPARCFIEQHEPFEREWYAGSAGYLSTRQSEFCVTLRSAKVTANVVRLYAGAGIVRGSDPEQEWQEIDNKAAGLRTLLQMDA

SEQ ID NO: 94809 - protein, 431 aa, Salmonella agona
  misc_feature (1)..(431): tr|B5EZI9|B5EZI9_SALA4 Isochorismate synthase MenF OS=S almonella agona (strain SL483) OX=454166 GN=menF PE=3 S V=1
MHSITTALENLTRQLSQEIPATPGLCIFDAPFPLNDAFDALSWLASQSSFPQFYWQQRNGDEEAAVLGAITVFSSLDLAQRFLRQHAQPDLRIWGLNAFEPKEGYLLLPRLEWRRSGGTATLRLHLHSDVSLRDDARQAKAFLASLVGIKPVPALRLSLTSEQHWPDKDGWVKLIQQATHTIAQEAFDKVVLARATDLQFSRPVNAAAMMASSRRLNLNCYHFFMAFSADTAFLGSSPERLWRRRETALRTEALAGTVANHPDNHKAWQLGEWLMKDDKNQRENMLVVEDICQRLQNCTHSLDVLPPQVLRLRKVQHLRRCIWTALNQADDTLCLHQLQPTAAVAGIPREPARCFIEQHEPFEREWYAGSAGYLSTRQSEFCVTLRSAKVTANVVRLYAGAGIVRGSDPEQEWQEIDNKAAGLRTLLQMDA

SEQ ID NO: 94810 - protein, 431 aa, Salmonella anatum; identical to SEQ ID NO: 94808
  misc_feature (1)..(431): tr|A0A2T8MBA2|A0A2T8MBA2_SALAN Isochorismate synthase M enF OS=Salmonella anatum OX=58712 GN=menF PE=3 SV=1

SEQ ID NO: 94811 - protein, 431 aa, Salmonella arizonae
  misc_feature (1)..(431): tr|A9MJB5|A9MJB5_SALAR Isochorismate synthase MenF OS=S almonella arizonae (strain ATCC BAA-731 / CDC346-86 / R SK2980) OX=41514 GN=menF PE=3 SV=1
MHSITTALENLTRQLSQEIPATPGLCVFEAPFPLNDAFDALSWLASQSSFPQFYWQQRNGDEEAAVLGAVTVFSSLDLAQRFLRQHQQPDLRIWGLNAFEPKESYLLLPRLEWRRSGGTATLRLHLHSDVSLRDDARQARAFLASLVGIKPVPALRLSLTGEQHWPDKDGWVKLIQQATHAIAQEAFDKVVLARATDLQFSRPVNAAAMMASSRRLNLNCYHFFMAFSADSAFLGSSPERLWRRRETALRTEALAGTVANHPDNHKAWQLGEWLMKDDKNQRENILVVEDICQRLQHCTHSLDVLPPQVLRLRKVQHLRRCIWTALNQADDTLCLHQLQPTAAVAGIPREPARCFIEQHEPFEREWYAGSAGYLSTRQSEFCVTLRSAKVTANVVRLYAGAGIVRGSDPEQEWQEIDNKAAGLRTLLQMDA

SEQ ID NO: 94812 - protein, 431 aa, Salmonella berta; identical to SEQ ID NO: 94808
  misc_feature (1)..(431): tr|A0A3V6R702|A0A3V6R702_SALBE Isochorismate synthase M enF OS=Salmonella berta OX=28142 GN=menF PE=3 SV=1

SEQ ID NO: 94813 - protein, 431 aa, Salmonella bongori
  misc_feature (1)..(431): tr|A0A0K0HC06|A0A0K0HC06_SALBC Isochorismate synthase M enF OS=Salmonella bongori (strain ATCC 43975 / DSM 1377 2 / NCTC 12419) OX=218493 GN=menF PE=3 SV=1
MHSITTALENLTRQLSQEIPAAPGICVFDAPFPLNDAFDALSWLASQSSFPQFYWQQRNGDEEAAILGAATVFSSLDLAQQFLRQHQQPDLRIWGLNAFEPKEGYLLLPRLEWRRNGGTAVLRLHLYSDISLRDDARQARVFLTSLVAIKPLPALRLSLTDERHWPDKDGWVKLIQQATHTIAQEAFDKVVLARATDLHFSRPVNAGAMMASSRRLNLNCYHFFMAFSSDSAFLGSSPERLWRRRETALRTEALAGTVANHPDNHKAWQLGEWLMKDDKNQRENMLVVEDICQRLQNCTHSLDVLPPQVLRLRKVQHLRRCIWTALNQADDTLCLHQLQPTAAVAGLPREPARCFIEQYEPFEREWYAGSAGYLSTRQSEFCVTLRSAKVTANVVRLYAGAGIVRGSDPEQEWQEIDNKAAGLRTLLQMDA

SEQ ID NO: 94814 - protein, 431 aa, Salmonella choleraesuis; identical to SEQ ID NO: 94808
  misc_feature (1)..(431): tr|Q57M46|Q57M46_SALCH Isochorismate synthase MenF OS=S almonella choleraesuis (strain SC-B67) OX=321314 GN=men F PE=3 SV=1

SEQ ID NO: 94815 - protein, 431 aa, Salmonella derby
  misc_feature (1)..(431): tr|A0A4Z9KW55|A0A4Z9KW55_SALDE Isochorismate synthase M enF OS=Salmonella derby OX=28144 GN=menF PE=3 SV=1
MHSITTALENLTRQLSQEIPATPGLCVFDAPFPLNDAFDALSWLASQSSFPQFYWQQRNGDEEAAVLGAITVFSSLDLAQRFLRQHAQPDLRIWGLNAFEPKEGYLLLPRLEWRRSGGTATLRLHLHSDVSLRDDARQAKAFLASLVGIKPVPALRLSLTSEQHWPDKDGWVKLIQQATHTIAQEAFDKVVLARATDLQFSRPVNAAAMMASSRRLNLNCYHFFMAFSADTAFLGSSPERLWRRRETALRTEALAGTVANHPDNHKAWQLGEWLMKDDKNQRENMLVVEDICQRLQNCTHSLDVLLPQVLRLRKVQHLRRCIWTALNQADDTLCLHQLQPTAAVAGIPREPARYFIEQHEPFEREWYAGSAGYLSTRQSEFCVTLRSAKVTANVVRLYAGAGIVRGSDPEQEWQEIDNKAAGLRTLLQMDA

SEQ ID NO: 94816 - protein, 391 aa, Salmonella diarizonae
  misc_feature (1)..(391): tr|A0A379U2G5|A0A379U2G5_SALDZ Isochorismate synthase E ntC OS=Salmonella diarizonae OX=59204 GN=entC PE=4 SV=1
MDMPLTEDAQETMATLAPDCFFFMSPYRSFTTSGCFARYTEPAAAGDSPDSPFQQKLRQQFTEAKSQGIANPILVGAIPFDTRQPSSLFIPMECQCFSRQEKQRTARYFTDHQSLTVTARKAIPEQDAFEAMVARAAMLTATPDVDKVVLSRLIDITTDMAVDSGALLERMVAQNPVSYNFHVPLADGGVLLGASPELLLRKEGDRFSSLPLAGSARRQPDDVLDREAGNRLLASQKDRHEHELVTQAMKQILRDRSTELQLPSSPQLITTPTLWHLGTPFEGKANAGENALTLACLLHPTPALSGFPHQVAKKLIAELEPFDRELFGGIVGWCDAEGNGEWVVTIRCAKLHGNQVRLFAGAGIVPASSPVGEWRETGVKLSTMLNVFGLH

SEQ ID NO: 94817 - protein, 391 aa, Salmonella dublin
  misc_feature (1)..(391): tr|A0A3T3IL56|A0A3T3IL56_SALDU Isochorismate synthase E ntC OS=Salmonella dublin OX=98360 GN=entC PE=4 SV=1
MDMSLAEDAQETMATLAPDRFFFMSPYRSFTTSGCFARYTEPAVAGDSPDSPFQQKLRQQFAEAKSQGIANPILVGAIPFDTRQPSSLFIPMAWQSFSRQQKQRTARYFTDHQSLTVTARKAIPEQDAFEAMVARAAMLTATPDVDKVVLSRLVDITTDVAVDSGALLERLVAQNPVSYNFHVPLADGGVLLGASPELLLRKEGERFSSLPLAGSARRQPDDVLDREAGNRLLASQKDRHEHELVTQAMKQILRDRSTELQLPSSPQLITTPTLWHLGTPFEGKANAGENALTLACLLHPTPALSGFPHQVAKKLIAELEPFDRELFGGIVGWCDAEGNGEWVVTIRCAKLHGNQVRLFAGAGIVPASSPVGEWRETGVKLSTMLNVFGLH

SEQ ID NO: 94818 - protein, 431 aa, Salmonella enterica; identical to SEQ ID NO: 94808
  misc_feature (1)..(431): tr|A0A2T8R2H3|A0A2T8R2H3_SALET Isochorismate synthase M enF OS=Salmonella enterica subsp. enterica serovar 4,12 :i:- OX=353569 GN=menF PE=3 SV=1

SEQ ID NO: 94819 - protein, 431 aa, Salmonella enteritidis
  misc_feature (1)..(431): tr|A0A3R0QC79|A0A3R0QC79_SALEN Isochorismate synthase M enF OS=Salmonella enteritidis OX=149539 GN=menF PE=3 SV =1
MHSITTALENLTRQLSQEIPATPGLCVFDAPFPLNDAFDALSWLASQSSFPQFYWQQRNGDEEAAVLGAITVFSSLDLAQRFLRQHSQPDLRIWGLNAFEPKEGYLLLPRLEWRRSGGTATLRLHLHSDVSLRDDARQAKAFLASLVGIKPVPALRLSLTGEQHWPDKDGWVKLIQQATHTIAQEAFDKVVLARATDLQFSRPVNAAAMMASSRRLNLNCYHFFMAFSADTAFLGSSPERLWRRRETALRTEALAGTVANHPDNHKAWQLGEWLMKDDKNQRENMLVVEDICQRLQNCTHSLDVLPPQVLRLRKVQHLRRCIWTALNQADDTLCLHQLQPTAAVAGIPREPARCFIEQHEPFEREWYAGSAGYLSTRQSEFCVTLRSAKVTANVVRLYAGAGIVRGSDPEQEWQEIDNKAAGLRTLLQMDA

SEQ ID NO: 94820 - protein, 431 aa, Salmonella gallinarum
  misc_feature (1)..(431): tr|B5RCD5|B5RCD5_SALG2 Isochorismate synthase MenF OS=S almonella gallinarum (strain 287/91 / NCTC 13346) OX=55 0538 GN=menF PE=3 SV=1
MHSITTALENLTRQLSQEIPATPGLCVFDAPFPLNDAFDALSWLASQSSFPQFYWQQRNGDEEAAVLGAITVFSSLDLAQRFLRQHAQPDLRIWGLNAFEPKEGYLLLPRMEWRCSGGTATLRLHLHSDVSLRDDARQAKAFLASLVGIKPVPALRLSLTSEQHWPDKDGWGKLIQQATHTIAQEAFDKVVLARATDLQFSRPVNAAAMMASSRRLNLNCYHFFMAFSADTAFLGSSPERLWRRRETALRTEALAGTVANHPDNHKAWQLGEWLMKDDKNQRENMLVVEDICQRLQNCTHSLDVLPPQVLRLRKVQHLRRCIWTALNQADDTLCLHQLQPTAAVAGIPREPARCFIEQHEPFEREWYAGSAGYLSTRQSEFCVTLRSAKVTANVVRLYAGAGIVRGSDPEQEWQEIDNKAAGLRTLLQMDA

SEQ ID NO: 94821 - protein, 431 aa, Salmonella hadar; identical to SEQ ID NO: 94808
  misc_feature (1)..(431): tr|A0A3V2W2Y8|A0A3V2W2Y8_SALHA Isochorismate synthase M enF OS=Salmonella hadar OX=149385 GN=menF PE=3 SV=1

SEQ ID NO: 94822 - protein, 415 aa, Salmonella houtenae
  misc_feature (1)..(415): tr|A0A484VXT4|A0A484VXT4_SALHO Menaquinone-specific iso chorismate synthase OS=Salmonella houtenae OX=59205 GN= SBOV23701 PE=4 SV=1
MHSITTALENLTRQLSQEIPATPGLCVFDAPFPLNDAFDALSWLASQSSFPQFYWQQRNGDEEAAVLGAITVFSSLDLAQRFLRQHSQPDLRIWGLNAFEPKEGYLLLPRLEWRRSGGTATLRLHLYSDVSLRDDACQAKAFLASLIGIKPVPALRLSLTGEQHWPDKNGWVKLIQQATHTIAQEAFDKVVLARATDLQFSRPVNAAAMMASSRRLNLNCYHFFMAFSADSAFLGSSPERLWRRRETALRTEALAGTVANHPDNHKAWQLGEWLMKDDKNQRENMLVVEDICQRLQNCTHSLDVLPPQVLRLRKVQHLRRCIWTALNQADDTLCLHQLQPTAAVAGIPREPARCFIEQHEPFEREWYAGSAGYLSTRQSEFCVTLRSAKVTANVVRLYAGAGIVRGPIRNRNGRK

SEQ ID NO: 94823 - protein, 391 aa, Salmonella infantis
  misc_feature (1)..(391): tr|A0A3R0D9X7|A0A3R0D9X7_SALIN Isochorismate synthase E ntC OS=Salmonella infantis OX=595 GN=entC PE=4 SV=1
MDMSLAEDAQETMATLAPDRFFFMSPYRSFTTSGCFARYTEPAVAGDSPDSPFQQKLRQQFAEAKSQGIANPILVGAIPFDTRQPSSLFIPMAWQSFSRQQKQRTARYFTDHQPLTVTARKAIPEQDAFEAMVARAAMLTATPDVDKVVLSRLIDITTDVAVDSGALLERLVAQNPVSYNFHVPLADGGVLLGASPELLLRKEGERFSSLPLAGSARRQPDDVLDREAGNRLLASQKDRHEHELVTQAMKQILRDRSTELQLPSSPQLITTPTLWHLGTPFEGKANAGENALTLACLLHPTPALSGFPHQVAKKLIAELEPFDRELFGGIVGWCDAEGNGEWVVTIRCAKLHGNQVRLFAGAGIVPASSPVGEWRETGVKLSTMLNVFGLH

SEQ ID NO: 94824 - protein, 431 aa, Salmonella montevideo
  misc_feature (1)..(431): tr|A0A3A3KD70|A0A3A3KD70_SALMO Isochorismate synthase M enF OS=Salmonella montevideo OX=115981 GN=menF PE=3 SV= 1
MHSITTALENLTRQLSQEIPATPGLCVFDAPFPLNDAFDALSWLASQSSFPQFYWQQRNGDEEAAVLGAITVFSSLDLAQRFLRQHAQPDLRIWGLNAFEPKEGYLLLPRLEWRRSGGTATLRLHLHSDVSLRDDARQAKAFLASLVGIKPVPALRLSLTSEQHWPDKDGWVKLIQQATHTIAQEAFDKVVLARATDLQFSRPVNAAAMMASSRRLNLNCYHFFMAFSADTAFLGSSPERLWRRRETALRTEALAGTVANHPDNHKAWQLGEWLMKDDKNQRENMLVVEDICQRLQNCTHSLDVLPPQVLRLRKVQHLRRCIWTALNQADDTLCLHQLQPTAAVAGIPREPARCFIEQHEPFEREWYAGSAGYLSTRQSEFCVTLRSAKVTANVVRLYAGAGIVRGSDPEQEWQEIDNKAAGLRTLLQMDV

SEQ ID NO: 94825 - protein, 391 aa, Salmonella muenchen
  misc_feature (1)..(391): tr|A0A3T3ES68|A0A3T3ES68_SALMU Isochorismate synthase E ntC OS=Salmonella muenchen OX=596 GN=entC PE=4 SV=1
MDMSLAEDAQETMATLAPDRFFFMSPYRSFTTSGCFARYTEPAVAGDSPDSPFQQKLRQQFAEAKSQGIANPILVGAIPFDTRQPSSLFIPMAWQSFSRQQKQRTARYFTDHQSLTVTARKAIPEQDAFEAMVARAAMLTATPDVDKVVLSRLIDITTDVAVDSGALLERLVAQNPVSYNFHVPLADGGVLLGASPELLLRKEGERFSSLPLAGSARRQPDDVLDREAGNRLLASQKDRHEHELVTQAMKQILRDRSTELQLPSSPQLITTPTLWHLGTPFEGKANAGENALTLACLLHPTPALSGFPHQVAKKLIAELEPFDRELFGGIVGWCDAEGNGEWVVTIRCAKLHGNQVRLFAGAGIVPASSPVGEWRETGVKLSTMLNVFGLH

SEQ ID NO: 94826 - protein, 389 aa, Salmonella muenster
  misc_feature (1)..(389): tr|A0A5I7TND3|A0A5I7TND3_SALMS Isochorismate synthase E ntC (Fragment) OS=Salmonella muenster OX=82689 GN=entC PE=4 SV=1
MDMSLAEDAQETMATLAPDRFFFMSPYRSFTTSGCFARYTEPAVAGDSPDSPFQQKLRQQFAEAKSQGIANPILVGAIPFDTRQPSSLFIPMAWQSFSRQQKQRTARYFTDHQPLTVTARKAIPEQDAFEAMVARAAMLTATPDVDKVVLSRLIDITTDVAVDSGALLERLVAQNPVSYNFHVPLADGGVLLGASPELLLRKEGERFSSLPLAGSARRQPDDVLDREAGNRLLASQKDRHEHELVTQAMKQILRDRSTELQLPSSPQLITTPTLWHLGTPFEGKVNAGENALTLACLLHPTPALSGFPHQVAKKLIAELEPFDRELFGGIVGWCDAEGNGEWVVTIRCAKLQGNQVRLFAGAGIVPASSPVGEWRETGVKLSTMLNVFG

SEQ ID NO: 94827 - protein, 431 aa, Salmonella newport; identical to SEQ ID NO: 94824
  misc_feature (1)..(431): tr|A0A3T3D2P0|A0A3T3D2P0_SALNE Isochorismate synthase M enF OS=Salmonella newport OX=108619 GN=menF PE=3 SV=1

SEQ ID NO: 94828 - protein, 431 aa, Salmonella oranienberg; identical to SEQ ID NO: 94808
  misc_feature (1)..(431): tr|A0A3Z0YS27|A0A3Z0YS27_SALON Isochorismate synthase M enF OS=Salmonella oranienberg OX=28147 GN=menF PE=3 SV= 1

SEQ ID NO: 94829 - protein, 431 aa, Salmonella paratyphi; identical to SEQ ID NO: 94808
  misc_feature (1)..(431): tr|C0Q058|C0Q058_SALPC Isochorismate synthase MenF OS=S almonella paratyphi C (strain RKS4594) OX=476213 GN=men F PE=3 SV=1

SEQ ID NO: 94830 - protein, 391 aa, Salmonella potsdam
  misc_feature (1)..(391): tr|A0A5I6RXR0|A0A5I6RXR0_SALPO Isochorismate synthase E ntC OS=Salmonella potsdam OX=597 GN=entC PE=4 SV=1
MDMSLAEDAQETMATLAPDRFFFMSPYRSFTTSGCFARYTEPAVAGDSPDSPFQQKLRQQFAEAKSQGIANPILVGAIPFDTRQPSSLFIPMAWQSFSRQQKQRTARYFTDHQPLTVTARKAIPEQDAFEAMVARAAMLTATPDVDKVVLSRLIDITTDVAVDSGALLERLVAQNPVSYNFHVPLADGGVLLGASPELLLRKEGERFSSLPLAGSARRQPDDVLDREAGNRLLASQKDRHEHELVTQAMKQILRDRSTELQLPSSPQLITTPTLWHLGTPFEGKANAGENALTLACLLHPTPALSGFPHQAAKKLIAELEPFDRELFGGIVGWCDAEGNGEWVVTIRCAKLHGNQVRLFAGAGIVPASSPVGEWRETGVKLSTMLNVFGLH

SEQ ID NO: 94831 - protein, 382 aa, Salmonella rubislaw
  misc_feature (1)..(382): tr|A0A5I6UWM0|A0A5I6UWM0_SALRU Isochorismate synthase E ntC (Fragment) OS=Salmonella rubislaw OX=598 GN=entC PE =4 SV=1
MDMSLAEDAQETMATLAPDRFFFMSPYRSFTTSGCFARYTEPAVAGDSPDSPFQQKLRQQFAEAKSQGIANPILVGAIPFDTRQPSSLFIPMAWQSFSRQQKQRTARYFTDHQPLTVTARKAIPEQDAFEAMVARAAMLTATPDVDKVVLSRLIDITTDVAVDSGALLERLVAQNPVSYNFHVPLADGGVLLGASPELLLRKEGERFSSLPLAGSARRQPDDVLDREAGNRLLASQKDRHEHELVTQAMKQILRDRSTELQLPSSPQLITTPTLWHLGTPFEGKANAGENALTLACLLHPTPALSGFPHQVAKKLIAELEPFDRELFGGIVGWCDAEGNGEWVVTIRCAKLQGNQVRLFAGAGIVPASSPVGEWRETGVKLS

SEQ ID NO: 94832 - protein, 391 aa, Salmonella schwarzengrund
  misc_feature (1)..(391): tr|A0A0N1QY29|A0A0N1QY29_SALSV Isochorismate synthase E ntC OS=Salmonella schwarzengrund (strain CVM19633) OX=4 39843 GN=SeSA_A0753 PE=4 SV=1
MDMSLAEDAQETMATLAPDRFFFMSPYRSFTTSGCFARYTEPAVAGDSPDSPFQQKLRQQFAEAKSQGIANPILVGAIPFDTRQPSSLFIPMAWQSFSRQQKQRTARYFTDHQPLTVTARKAIPEQDAFEAMVARAAMLTATPDVDKVVLSRLIDITTDVAVDSGALLERLVAQNPVSYNFHVPLADGGVLLGASPELLLRKEGERFSSLPLAGSARRQPDDVLDREAGNRLLASQKDRHEHELVTQAMKQILRDRSTELQLPSSPQLITTPTLWHLGTPFEGKANAGENALTLACLLHPTPALSGFPHQVAKKLIAELEPFDRELFGGIVGWCDAEGNGEWVVTIRCAKLQGNQVRLFAGAGIVPASSPVGEWRETGVKLSTMLNVFGLH

SEQ ID NO: 94833 - protein, 431 aa, Salmonella senftenberg; identical to SEQ ID NO: 94808
  misc_feature (1)..(431): tr|A0A401ASN8|A0A401ASN8_SALSE Isochorismate synthase M enF OS=Salmonella senftenberg OX=28150 GN=menF PE=3 SV= 1

SEQ ID NO: 94834 - protein, 185 aa, Salmonella sp.
  misc_feature (1)..(185): tr|A0A509CUG7|A0A509CUG7_9ENTR Isochorismate synthase E ntC OS=Salmonella sp. NCTC 11881 OX=2583579 GN=entC_1 P E=4 SV=1
MTFWIARRETDCWLHKKDRHEHELVTQAMKQILRDRSTELQLPSSPQLITTPTLWHLGTPFEGKANAGENALTLACLLHPTPALSGFPHQVAKKLIAELEPFDRELFGGIVGWCDAEGNGEWVVTIRCAKLHGNQVRLFAGAGIVPASSPVGEWRETGVKLSTMLNVFWTALRNDDAYTFHPLAG

SEQ ID NO: 94835 - protein, 391 aa, Salmonella thompson; identical to SEQ ID NO: 94823
  misc_feature (1)..(391): tr|A0A3V4Q844|A0A3V4Q844_SALTH Isochorismate synthase E ntC OS=Salmonella thompson OX=600 GN=entC PE=4 SV=1

SEQ ID NO: 94836 - protein, 431 aa, Salmonella typhi
  misc_feature (1)..(431): tr|Q8Z532|Q8Z532_SALTI Isochorismate synthase MenF OS=S almonella typhi OX=90370 GN=menF PE=3 SV=1
MHSITTALENLTRQLSQEIPATPGLCVFDAPFPLNDAFDALSWLASQSSFPQFYWQQRNGDEEAAVLGAITVFSSLDLAQRFLRQHAQPDLRIWGLNAFEPKEGYLLLPRLEWRRSGGTATLRLHLHSDVSLRDDARLAKAFLASLVGIKPVPALRLSLTSEQHWPDKDGWVKLIQQATHTIAQEAFDKVVLARATDLQFSRPVNAAAMMASSRRLNLNCYHFFMAFSADTAFLGSSPERLWRRRETALRTEALAGTVANHPDNHKAWQLGEWLMKDDKNQRENMLVVEDICQRLQNCTHSLDVLPPQVLRLRKVQHLRRCIWTALNQADDTLCLHQLQPTAAVAGIPREPARCFIEQHEPFEREWYAGSAGYLSTRQSEFCVTLRSAKVTANVVRLYAGAGIVRGSDPEQEWQEIDNKAAGLRTLLQMDA

SEQ ID NO: 94837 - protein, 431 aa, Salmonella typhimurium; identical to SEQ ID NO: 94808
  misc_feature (1)..(431): tr|A0A0H3NNW7|A0A0H3NNW7_SALTS Isochorismate synthase M enF OS=Salmonella typhimurium (strain SL1344) OX=216597 GN=menF PE=3 SV=1

SEQ ID NO: 94838 - protein, 391 aa, Salmonella virchow; identical to SEQ ID NO: 94825
  misc_feature (1)..(391): tr|A0A5J0U9F4|A0A5J0U9F4_SALVI Isochorismate synthase E ntC OS=Salmonella virchow OX=48409 GN=entC PE=4 SV=1

SEQ ID NO: 94839 - protein, 440 aa, Samsonia erythrinae
  misc_feature (1)..(440): tr|A0A4R3VTL1|A0A4R3VTL1_9GAMM Isochorismate synthase M enF OS=Samsonia erythrinae OX=160434 GN=menF PE=3 SV=1
MEQLSGLLRQMQQDLRAPQPEHAGFKQITHSVTLSEASELLPWLATQPVYPQFYWQHRQDSEEAAVCGKVCGFHHLQDAEAFLLRQSCDRHVRIWGLNAFNPITEQAALPPGYLFLPRVELLRQANTLTLRVNLFSDTSLQQDADEAAAFITLLLPAARQPLLQADVQSVAHHPDRQGWIHLLQRALGDIKAGLMEKVVLARATTLTLAQPLQATTLMAASRAANHHCFHFMLAHDARQAFLGSSPERLYRRRDTELETEALAGTVANAREADKADELADWLMKDVKNQCENMLVVDDICQRLQQSALSLDVMPPEIVRLRKVQHLRRGIHATLRTASDSACLDALQPTAAVAGLPRQDARRFIAAHEPFERGWYAGSAGYLSRQQSEFSVALRSAEIRDHVLTLYAGAGIVADSDPEQEWQELENKAAGLRSLLEGDMA

SEQ ID NO: 94840 - protein, 470 aa, Sandaracinaceae bacterium
  misc_feature (1)..(470): tr|A0A520R853|A0A520R853_9DELT Isochorismate synthase O S=Sandaracinaceae bacterium OX=2510337 GN=EVA89_00340 P E=4 SV=1
MNAPAQTALSPAPFDRKEAERFLMDALGRALEQRTVAVVRFPAPRAPADAMLRALRRDTAIAWRPPEGPELSAHGAAATLTLRGDDRFEDLKRESAALFAELQRVTHPDAPLAAPRLFGGFSFAVGGASQLPWRGFGDGRFFLARWTYERGASPTLTYAADLRDGWAGRLSLARAELGAVWDALVSPAPETPPPSVVRVDHLSPERWRAQIDAITDAIARGEFEKVVAARRTEVRTDRDLDAWAILRGLGARYPETWRFGLRFGQSTFLAATPERLFVKRGRLVETDALAGSIAANGEDAEARLLASAKDQREHRPVVEHLQARLGPLCTQLDAPDAPQLRRMPNILHLHTQLRGHLRAEVHAADLASALHPTPAVGGVPAEAAVQWIAAQEAHPRGWYAGPVGWLDADGDADFAVALRCGVIQGANAWAWAGGGIVEGSEPDAEWQESALKLRPFTHALGVDDDADRPK

SEQ ID NO: 94841 - protein, 474 aa, Unknown
  misc_feature (1)..(474): tr|A0A432GMG4|A0A432GMG4_9DELT Isochorismate synthase M enF OS=SAR324 cluster bacterium OX=2024889 GN=menF PE=3 SV=1
MLPANQPSIDYNLKVKPEKFQSLEDARCFLLKQVKEWDNSQNKSIPENSGVVRLEASLESAHPLEWLTLQDCSQKIYWENRSQKEQFAGIGTALEIADGKDGYENILQVISKILQDSPETVRFYGGMRFDSKASISPEWETWGTARFTIPLVELSIIEENVTLACNFLPGDKKNSKLQPLQNLLESLRTEDVIIPDNPLIGLERHDLPEYRQWCRLVEQGLENISSGKINKVVLARAAVFSLARDYDPTELLLQLGRHAPQAFHFCFQLAPNKAFLGITPELLYRRSGTQIGSEAIAGTRPRGQTLEDDQRLADELRNSEKEQREHLMVLDLMERVLKQFCRQTKRLSYLERLPLRHVQHLLSRMQGILRPNVNDSDLLPSFHPTPAVSGTPDPEAREIIRELEPFDRGWYAGPVGWINRNQAEFAVAIRSGLLCGRTLRVYTGAGIVAGSVPEEEWREIEVKLQSWKSLLGRS

SEQ ID NO: 94842 - protein, 503 aa, Schaalia canis
  misc_feature (1)..(503): tr|A0A3P1SEH2|A0A3P1SEH2_9ACTO Isochorismate synthase O S=Schaalia canis OX=100469 GN=EII11_05390 PE=4 SV=1
MSDLSATLLPSPSTTPADAQLIVRIARIPVEHPAQTLSLHELLPADIDGTQAWFGHSRRMVGWGEAARITVVGPHAIRDAARTWDDLRGSARVECVCTPACADDEMPALPLAFGSFGFSATTPGFLIVPDVAVIEMPAGNDDTPHSTTALWGTDWGGLGPARGTRYVVTTQVARGEAGSVKSTAHEKGADSASAAAQTSSNDATSTGLDAPSLNDPLAVLDAALATRTAVAPNAPEGITTAPGRMTQAQWMASVSEVIELLRAGAASKVVMSRDMVVQSPTPIDPRFLLERLTTLYPTTWAYAVEGLIGATPEMLAAMHGGQVSSRVLAGTTSPGEGEALMSSMKDRTEHMFAVESVARALAPITQTLDVPEVPQVLDLPNVSHLATDVTATLASGNVLDVIAALHPTAAVCGTPTKLAFDILERFESTERGRYSGPVGWVDGAGEGEFGIALRCGQLSEAGRRLTILAGGGIMPDSIPEAELRETRAKMAPLLQALGMSIAG

SEQ ID NO: 94843 - protein, 478 aa, Schaalia cardiffensis
  misc_feature (1)..(478): tr|N6W633|N6W633_9ACTO Isochorismate synthase DhbC OS=S chaalia cardiffensis F0333 OX=888050 GN=dhbC PE=4 SV=1
MVAMPNASTTESLHARAVSLAGTQWADTPPLHFLPEDPREDAVALAWLGFRCQMVGWGRAAAWKGSGVHAIGEAGAWWDRLRAASSVSVDVHGPHSKDRDSGERTSRAPLSGDSLSGDSLSGDSLSGDSLSGDSPSAEAASHLERALPSFPIAFGSFGFSARTESTLIVPSFLLIDTPEGRWAVSISSSSPMPDPLEVLASTTPTSPRPPRGLRTDVGRMTQREWRASVEALAARLRAGDASKAVMTRDMLVRADSAITVHYLLERLDSLYPQTWRFCVDSLIGASPEMLGSAADGVLHSRVLAGTSPAGRGAELLESEKNLREHTLAVESVASALRPIVDDLQVPETPFILDLPNVAHLASDVQARLGELSLLEAVAALHPTAAVCGTPRDLALELLEEHERTERGRYSGPVGWVDANGEGEFCIALRCGALEEEGRALRIFAGGGIMPDSDPGEELAETRRKMAPLLDALGVDTTA

SEQ ID NO: 94844 - protein, 428 aa, Schaalia odontolytica
  misc_feature (1)..(428): tr|D4U054|D4U054_9ACTO Isochorismate synthase OS=Schaal ia odontolytica F0309 OX=649742 GN=HMPREF0970_01591 PE= 4 SV=1
MRQYSHVFQRAAAPAPTMEPMHNDFGCSRLVFRALVLPPQHPGSTCSLTSLLPDSGGSAWLGDRRQMIGLGRALTIESATPGAIADVRRAWEAAPASSCVEGAPSPVLFASFAFRSPARSVAFVPALTLIDEAGARWAITAGIGDAPDPLAAVDEALAEARPAPRVPESLTFGHGSMSRGQWRDSVRAMAQRLRDGAADKAVMARDMTVRCPHGFDERFLLERLSDLYPSTWRFCVDSLVGASPEMLIAASHGTASSRVLAGTCKPGEGEMLASSAKDLREHDLASESVSSILMQLCSSVTTQGPFLLSLPNVVHLATDVHARLGEAHLLDLVAALHPTAAVCGTPRPAAMRLIEELEDTERGRYSGPVGWVDTAGDGEFAISLRCGLTSGTRLRLFAGAGIMPDSDPDAELAETEAKMRPLLDALGV

SEQ ID NO: 94845 - protein, 411 aa, Schumannella sp.
  misc_feature (1)..(411): tr|A0A506XNZ9|A0A506XNZ9_9MICO Isochorismate synthase O S=Schumannella sp. 10F1B-5-1 OX=2590780 GN=FJ658_09240 PE=4 SV=1
MTDPADSVPALRVVTTPIAQLPSLLPLIDGVRPLVFLRRGDGVAGLGETLRLTFRGPDRIRDAAAVWKRIAAAATIDDPIGISGTGLIAFGAFAFADDSARESVLIVPRVIVGRRDGQSWVTRIDDADDALESTPLGPEYRLLLKPGAQGPDAYREAVAAAVQRIQSDAGLGKVVIARDKVGHLPEGADLRRVLTELALGYPDTWTFAVDGLLGSSPETLVRVAHGTVTARVLAGSAGRGKDAESDHAEALALATSQKDLDEHRFAVQSVLDALAPHSPSLVASELPFTLKLPNLWHLASDVEGTLADGSTALDLVCELHPTAAVAGTPRAAALATIAELEPFDRARWGGPVGWVDAAGNGKWAVALRSAEIDADGTITAYAGAGIVAESDPERELAETTLKFRPIVEAFG

SEQ ID NO: 94846 - protein, 466 aa, Scopulibacillus darangshiensis
  misc_feature (1)..(466): tr|A0A4R2P501|A0A4R2P501_9BACL Isochorismate synthase M enF OS=Scopulibacillus darangshiensis OX=442528 GN=menF PE=3 SV=1
MAIIEQHQLLENLKEGIKKAQFLSESVLVSYSKQIEFIDPLVFYRNGEILYKGSRIYWSDVEDVTMVGLGSAVVQAYNGEERFEKIEEYWRKVITGAVIHREVDVKGTGPVCMGGFSFDPVQMKTRLWKDFPDANFTVPNWLLTVKGNQCFLSINASVNEHMDPCTIESQLIDLEMQLLKNNTIPTPSQGESLMVEENQINEWLAMVHKSIDAINKGEMEKVVLSRTTTVTANKTFDQSSVLLALQERQSDCYTFAFEKGTSTFVGSTPERLIKKAGGKFNTMCLAGTISRGQTAEEDQKLGETLLSDPKNRDEHQMVVTMISDAMGKVCDKIVKSDSPQIYKSKDVQHLYTPIKGETKRELSLLSVVKALHPTPAMGGVPTEKAIEAIRERETYERGWYSAPIGWFDEDGDGEFVVAIRSGLITKENAVLFSGCGIVADSDPQSEYLETKIKFTPMLTALGGGWE

SEQ ID NO: 94847 - protein, 469 aa, Scytonema millei
  misc_feature (1)..(469): tr|A0A4V2X4L9|A0A4V2X4L9_9CYAN Isochorismate synthase O S=Scytonema millei VB511283 OX=1245923 GN=DYY89_10420 P E=4 SV=1
MLLLPRPANYHLNCQKLYQFLVASQKNCDRNCSQIVSISLEIDSIDPLVVLEKLARPRQLNFYFENKSKGEAIAAIDAVAQLQLAGANRFHLTQKFICSCLKEIEIFDSSNHTFAKPHFFCSFSFFSEATADSPFPVATVFLPRWQIARQGDRCVLVANLPIEADTNIDIFIQHLWRKIHEITSIEQPENEENHFQREFSQVNVSSIARFKQAVIDCSELIYKQQLSKVVLAHAIDVQVNTDFNLFNCLNRLRQMYPDCYVFSTHNGKGQNFIGASPERLISIRDRQLFTDALAGSISRGKTTAEDAVLANQLLQSEKERHEHRVVIDFITQSLQELSIAPQLLSPRLRRLANIQHLWTPIQARVPLNVHPLEIVAALHPTPAVGGVSRQLACKKIRTYEKFERGLYAAPLGWVNHQGDSEFIVGIRSALIDGDRARLYAGAGIVAGSNPDREIAEVQLKLQALLKALI

SEQ ID NO: 94848 - protein, 483 aa, Sedimenticola selenatireducens
  misc_feature (1)..(483): tr|A0A558DUP6|A0A558DUP6_9GAMM Isochorismate synthase O S=Sedimenticola selenatireducens OX=191960 GN=FHP88_130 40 PE=4 SV=1
MRHPTGIQYHLHSNPYESRQRLMANRQSLIKATIARLKQALTHLPHEEVGPFSITLSTPELQLHHLPHLDNNWFYWGEPSHRHYRLGLGEALRLSSIGPLRLQQLSDQFERVRSNWIQIDPDCTGLQASAFTGFAFDPEDPMLQSWEGLPNAAIFLPELLLHQTAEMCAITFSFAHKDLTRATLRSQHLLQKLIDALGANPDPNPVPTRFSRTATTPSDDEWITQVNKATHSIREGTMDKVVPFRRISVQASQPFNPARLMASLDDLHPSSILFSIRVDGSTFAAATPEHLLSRQGHLISCDAIGGTIKRSPNPVDDTNLGKTLINDPKSRHEHALVVKGILGSLKKHCCKLTSPTGPSLKRLRNLQHLWTGIKGELWEDTTLLRVADDLHPTAAVSGFPSANAQRWLDDHKNTTRGWYTGAAGWIDIQGDGELAVLLRCALLNGEHAELFAGAGVTSESCPIAELQETELKFGTMLEALEHA

SEQ ID NO: 94849 - protein, 461 aa, Sedimenticola thiotaurini
  misc_feature (1)..(461): tr|A0A558DAD5|A0A558DAD5_9GAMM Isochorismate synthase O S=Sedimenticola thiotaurini OX=1543721 GN=FHK82_04565 P E=4 SV=1
MANRQPLIKAIIARLKTSLTGLPAESKGLFSVTLAVPELQLHLLPPLKNNWFYWGEPSRREYLLGLGEALRLSSRGSHRLKQLSDQFENIRSKWIQMDPDLTGLHATAFTGFAFNPDDPMIQAWTGLPNAAIFFPELLLHQTSEACAVTFTFTHTDSSRATLRSQHLLQELLDGLGANSGPKTRKTTLSRTGATPSNDEWINQVSSATSAIRMGRLDKVVPFRRISVKSTHPFNPARLMASLDDLHPSSILFSVRLDGSTFAAATPEHLITRQGNKISCDAIGGTIKRALNPDEDMKLGRSLLEDPKSRHEHALVVKGILDSLKSHCHNLTAATSPSLKRLRNLQHLWTGINGKLSGDTTLLRVANDLHPTAAVSGFPSASAERWLHDHKNNTRGWYTGAAGWLDNRGDGELAVLLRCALLNGERAELFAGAGVTSESCPIAELQETELKFGTMLEALEHA

SEQ ID NO: 94850 - protein, 463 aa, Sediminibacillus albus
  misc_feature (1)..(463): tr|A0A1G8Z2X0|A0A1G8Z2X0_9BACI Isochorismate synthase M enF OS=Sediminibacillus albus OX=407036 GN=menF PE=3 SV =1
MIDTEIKKLGQAVREAVRTAKIKQKPQLLSITEPLAAIDPFSFFDNAEKFTGGRIFWNNSAEGHWLAGAGEALALTAADHRFEETERQWKEMLENALIHNPHRVPGTGPIAFGGFSFDPDKETTPLWADFNSSLLRVPAYLLTMVNGDCFLTCNVVIYEYDQPEQIELQVENHKKQLLKQQAILPEGPVITDKQEIEPDSWKQLVRNATNTIKQGKAEKIVLAREMKVFFKNKVNVSPILRQLADMQTNSYIFAFENGEDCFLGATPERLVKVENQQLLSTCLAGTAPRGRTEAEDRKIGGQLLSDEKNRQEHHFVVEMIKKAVAACCENVQVPEAPVLYPLKNLQHLYTPVEAVLNENYTIIDIVKRLHPTPALGGMPSEKSVAFIREHENMDRGWYGAPIGWLDANHNGEFAVAIRSALIRGGEASLFAGCGVVRDSDPEAEYQETNIKFTPMLSVLGGRS

SEQ ID NO: 94851 - protein, 463 aa, Sediminibacillus halophilus
  misc_feature (1)..(463): tr|A0A1G9QPB3|A0A1G9QPB3_9BACI Isochorismate synthase M enF OS=Sediminibacillus halophilus OX=482461 GN=menF PE =3 SV=1
MIQTELKELGLAVEEAVTAARSKQDSQLLSFTEPVPAIDPISFFANGFSFDGGRIFWGNAAGSLMLAGAGEACALTASGNNRFEQMESKWKKIIQEAIIHNPQRKPGTGPIAFGGFSFDPAKPVTSLWKSFPDSKLRIPAYLLTVVNGKHYLTSNIVVNQDDRSADIEQRLEKERRLLLSATTLPDGPFVSSKSEVEPLAWKQLVRQATETIKQGGTEKIVLARELRVQFSDKANVAPVLNALTDSQTNSYIFAFENGDDCFLGATPERLVKIEDKKLLSTCLAGTAPRGITEAEDNRIGQQLLTDKKNRSEHQFVVEMIKKAVSACCEQVRVPDEPVLYPLKNLQHLYTPVEAVLHDGYTILDIVKQLHPTPALGGLPSEESVAFIREHEHLDRGWYGAPIGWLDAFQNGEFAVAIRSALIQGDHASLFAGCGVVKDSNPEEEYQETNIKFTPILSVLGGQS

SEQ ID NO: 94852 - protein, 429 aa, Senegalimassilia sp.
  misc_feature (1)..(429): tr|A0A4Q2JXN1|A0A4Q2JXN1_9ACTN Isochorismate synthase O S=Senegalimassilia sp. KGMB04484 OX=2509433 GN=ET524_04 450 PE=4 SV=1
MTRIFSFTQPLDVDIVDAFCLLQKGFTDQFVYYRKDRPVRFMGLGRCIALPMLDDAECELSGPAGEQPVFFSFNRFDAHNPAPADELFQSFPSLHFMLPEVVLIENERGTFLQVNSLGPVYAGRVERFSRLALSARPRTRRSIDYTLTLDSRETWERAVDDGLAAIHAGRVDKVVLSRRLKVRAAEPFSSKDLLVNLIDGTAHGTVLLYRYADVFFCGCTPELLVRKRGADLESMCLAGTCPTSPDAQENARLAAALMADQKNRTEHDYVVRFIRDVLNRTCYSVDVPAQPTIMPLTCIQHLMTPARAKLLDGVDLWSMMGDLHPTPAVSGAPVGEAKMLIRQVEAYNRGFFAGACGYVDAAGDGEFSVALRTGVFDGEIGYVYAGCGIVDGSRAADEYDEIALKLKTVLSAFGGGTETVVAGVDGGAR

SEQ ID NO: 94853 - protein, 570 aa, Senna obtusifolia
  misc_feature (1)..(570): tr|V5N3N1|V5N3N1_9FABA Chloroplast isochorismate syntha se OS=Senna obtusifolia OX=346985 GN=ICS PE=2 SV=1
MATGAAHSWLTSTKSAKSSSSTIMFGGSRSNSRESIHFMCHHHHHRPKFQGCCLSMNGCQTQRMKQHPTHTTAVNNVGTIETRSLPSVASPAMAMDSLNSAISHLVSHPPFTPSGIIRLQVPIEEQIEAMDWLHSQSDLLLPRCFFSGRPTHPYHANANNLVSVAGLGSAIFFRQLHPFSYNDWISIKRFLSETCPFIRAYGAIRFNAKGQVSSEWLPFGSFYFVIPQVEFDELEGTSMLAATIAWDNALSWPWENAINALQATLRKVSSFIVKFPKQAPRTSIVISHNIPSKVEWDLSVNRALHMIQKNHSLLKKVVLARSTRVVPTADIDPLSWLACLQVEGANAYQFLLQPPNAPAFIGNTPEQLFHRKFLHITSEALAGTRARGASAALDRQIELDLLSSPKDDIEFTIVRETIRSKLEAVCENVLVKPTKAIRKLPRIRHLFAQLTGRLQSEEDEFEILSSLHPSPAVCGFPTEEAQLLIAETEVFDRGMYAGPVGWFGGGESEFAVGIRSALVEKDVGALIYAGTGIVEGSNSYLEWDELELKTSQFTKLLKLDLPQRLKVDCI

SEQ ID NO: 94854 - protein, 442 aa, Serinicoccus sp.
  misc_feature (1)..(442): tr|A0A1B1NFE5|A0A1B1NFE5_9MICO Menaquinone-specific iso chorismate synthase OS=Serinicoccus sp. JLT9 OX=1758689 GN=SGUI_2778 PE=4 SV=1
MTRTIPRLRARTLAVDAPGDLLTRVPDEVDPREVAAWLREGDGLVGWGRVAEITTTGPDRFGEAEAWWTEVRAAAEVEDEVRLPGTGLVTFGSFTFSPDSQDASVLTIPRIVIGRRDGLSWVTQVVAGDEPWPVEHPAELLGRTNADIAVLDPLTESEGSVGADAWPGVVAAAVRRIGRGEVDKVVLARDVRVRHREGRAVRIAPVLERLQSRYAATWTFAVAGLVGATPEMLVRLQGGRVRSRVLAGTIRRPNGIPAHDTAVPGAGDRAHPMDPRLRLVSSTKDLDEHAFAVRSVAEALAPHCSDLMVPDAPYVLELPDVYHLASDLTGTMHSEATSLRLAAALHPSAAVCGTPTEAAAAVIGELEGMDRGRYAGPVGWMDGSGDGDWGIALRCGELADDRHSMRIFAGGGIVAASDPAAELAETEVKLTAMRHALGLADA

SEQ ID NO: 94855 - protein, 395 aa, Serratia ficaria
  misc_feature (1)..(395): tr|A0A240C837|A0A240C837_SERFI Isochorismate synthase e ntC OS=Serratia ficaria OX=61651 GN=entC_2 PE=4 SV=1
MATLTTENQTFPGFVYSEQSTFLYQSEFRSLSAQGVFERIETPAFGGERADSALAQNIGQALQRAKQAGQEAPVVVGAIPFDTRQPSCLYVPQQSRFVANDHYTRDARPMLQQHRLAACTSIPDEPRFKHAVAEAVSRFKQGRLSKAVLSRILEIELEQPVAGHQILNNLMVQNPNGYHFSLPLPDGGVLIGASPELLIRKQGGEIHSNPLAGSARRQADAQQDRIGSERLMRSTKDKYEHKLVIDDIRQRLAPLCATLSVPSGPSLMSTGTMWHLSTRIRGELRDPQLNVMQLACLLHPTPALCGFPTETARRLIADLEQYDRGLFSGIVGWCDANGDGEWAIVIRSGILRGNRVRLFAGAGIVEASTPQSEWAETAAKLGTMLNAFGLNSGAL

SEQ ID NO: 94856 - protein, 433 aa, Serratia fonticola
  misc_feature (1)..(433): tr|U2MFG3|U2MFG3_SERFO Isochorismate synthase MenF OS=S erratia fonticola AU-P3(3) OX=1332070 GN=menF PE=3 SV=1
MEQLSGVLRRLRQQLGHDFPREAGFRQLTLVVPGHLSDMLLEWLAAQVLFPQFYWRHREGRQEAAVCGALRQFSHPSMAQAFVNAYPAARLWGLTAFDGDAQLFLPRLEILNRQGKCELTLNLFSEQALSDDAQAALAWLENLLVIKPIENLQVKVLSVQHQPERSGWEIMLRDALKAINRQQMDKVVLARSSVLTLESPLFAPAMMAASRRVNHQCYHFMLRFDAHSAFLGSSPERLYLREGKHLLTEALAGTVANHPDERQAQALAQWLLQDGKNQQENLLVVDDICQRLQGGARAVDVLPPEVVRLRKVQHLRRRIEGQLNQGDDADCLQRLQPTAAVAGLPRQASREFIRQHEPFSRGWYAGSAGYLSASQAEFCVALRSCQIEDARVELYAGAGIVAGSDPAQEWQEIENKAAGLRTLLQSEHSGQVH

SEQ ID NO: 94857 - protein, 402 aa, Serratia liquefaciens
  misc_feature (1)..(402): tr|A0A515CS29|A0A515CS29_SERLI Isochorismate synthase O S=Serratia liquefaciens OX=614 GN=EGO53_03875 PE=4 SV=1
MSVTVKGTGQKKPHSKESESSVAGVSPTSGFFFTSPFRSLSTQGCFVKITLPAQGGDQLNGEFQQAVRHAFAEAKLAGVKNPVLCGAIPFDTHQPSALFIPQHTQWFERDAFLAGVTSPQEALPEIISQNEVPAQQPFMQMVADAVEATRGDQLDKVVLSRLLEIETREPVDSQALMARIIAQNPHGFHFHVPLEQGALLGASPELLLRKSGAQFYSNPLAGSARRDADPQRDREVSQQLLVSEKDLYEHQFVTEGMRQVLADRCSYLNIPTSPELLSTTTLWHLSTPIDGEAASRAENALSLACLLHPTPALCGTPTALAHQVIKQLEPFDRGLFGGIVGWCDAEGNGEWVVTIRCGTVQGNQVRLFAGAGIVQDSSPESEWHETGTKLSTISRAFGLNQG

SEQ ID NO: 94858 - protein, 396 aa, Serratia marcescens
  misc_feature (1)..(396): tr|A0A3E2EIK4|A0A3E2EIK4_SERMA Isochorismate synthase O S=Serratia marcescens subsp. sakuensis OX=211760 GN=E46 55_19150 PE=4 SV=1
MATLTTENQTFPGFAYAEQSTFLYRSEFRSLSASGVFERIETPAFGGEQEGSALAQHIRQALARANAAGQETPVVVGAIPFDTRRPSCLYVPESYEFVANDSFTRAARPMLQQPHRLAACTSIPDEPRFKHAVAEAVSRFKQGKLDKAVLSRILDIELEQPVAGHQILNNLMVQNPTGYHFSLPLADGGVLIGASPELLIRKQGGEIHTNPLAGSARRQDDPQQDRLGSERLMRSTKDKYEHKLVIDDIRRHLAPLCASLSVPSGPSLLSTGTMWHLSTRIRGELLNPNLNVMQLACLLHPTPALCGFPTESARQLIADLEPHDRGLFSGIVGWCDANGDGEWAIVIRSGLLRGNRVRLFAGAGIVAASTPQSEWLETAAKLGTMLNAFGLNSGAL

SEQ ID NO: 94859 - protein, 401 aa, Serratia nematodiphila
  misc_feature (1)..(401): tr|A0A5C7D0R2|A0A5C7D0R2_9GAMM Isochorismate synthase O S=Serratia nematodiphila OX=458197 GN=FOT58_02660 PE=4 SV=1
MDTAVNDINRKEVQECEEQRFAADFSPASGFFFTSPFRSLTTTGCFSRIRLPAADGADLNGEFQRSVRQAFAEARQAGIKKPLLCGAIPFDTRQPSALFIPQQSRWFDRAAFMAGVRPAADGPELAGVTELPPQQPFMNMVSDAVDAMKAGELDKVVLSRLLEIETRQPVDRHALMARVIAQNPHGFHFHVPLEQGALLGASPELLLRQDGGRFYSNPLAGSARREADPERDREVGERLMASAKDRHEHRIVTESMRDVLAGRCRYLNVPHTPELLTTTTLWHLSTPIDGEAASPDENALSLACLLHPTPALCGMPTAEAHALIGKLEPFDRGLFGGIVGWCDDEGNGEWVVTIRCGTVDGNRVRLFAGAGIVEDSSPESEWHETGTKLSTILRAFGINQG

SEQ ID NO: 94860 - protein, 400 aa, Serratia odorifera
  misc_feature (1)..(400): tr|D4E3D2|D4E3D2_SEROD Isochorismate synthase OS=Serrat ia odorifera DSM 4582 OX=667129 GN=entC PE=4 SV=1
MDTAMNGAKNMQSHSSEGGYLPPDLAAGFFFTSPFRSLSTQGCFAKVSLPAVGGDDVNGEFQQVVRHAFDEARLAGIKQPVLCGAIPFDTRQPSSLFIPRQTRWFDRNAFMAAQGIEHAAAPDIAHKTEVPAQAAFMQMVSDAVTATRAGTLDKVVLSRLLEIETCQPVDRHALMTRIIAQNPNGFHFHVPLADGALLGASPELLLRKTGAQFYSNPLAGSARREADPQRDREVSQQLLSSTKDHKEHRFVTEGMRAALSGRCRYLHIPNAPELLSTTTLWHLSTPIDGEVDPRQENALSLACLLHPTPALCGTPTRVARDLIAELEPFDRGVFGGIVGWCDAEGNGEWVVTIRCGTVSGNQVRLFAGAGIVQDSSPESEWHETGTKLSTILRAFGLNQG

SEQ ID NO: 94861 - protein, 430 aa, Serratia oryzae
  misc_feature (1)..(430): tr|A0A1S8CLT3|A0A1S8CLT3_9GAMM Isochorismate synthase M enF OS=Serratia oryzae OX=2034155 GN=menF PE=3 SV=1
MEQLSGLLRQLRQQLEQDFPSAAGMRQITLPIPDRLAAMLLEWLAAQTQFPQFYWRHRDTQQEAAVCGAVRQFSHPLQAQAFLHAYPCARLWGLNAFDDSALLLLPRVEILSRSGKGQLTLNLFSESSLHEDAVTAGRWLDELRVAKPIAALQVKVQSVLHQPERPAWDAMLHDALKAIENQQLDKVVLARSTLLTLANPLFAPALMAASCKVNHLCYHFMMRFDAHSAFLGSSPERLYLREGQHLLTEALAGTVASHTDERQARALAQWLLQDAKNRQENLLVVDDICQRLQGGASAVDVLPPEVVRLRRVQHLRRQIEGQLNRGDDADCLQRLQPTAAVAGLPRQAARDFIRQHEPFSRHWYAGSAGYLSIAQSEFCVALRSTQIDGAQMQLYAGAGIVSGSDPAEEWQEIENKVAGLRTLLQPEGGF

SEQ ID NO: 94862 - protein, 402 aa, Serratia plymuthica
  misc_feature (1)..(402): tr|A0A447QAI5|A0A447QAI5_SERPL Isochorismate synthase e ntC OS=Serratia plymuthica OX=82996 GN=entC PE=4 SV=1
MSATVKGAGQKKPQSKGSELNTAGVSPVSGFFFTSPFRSLSTQGCFAKITLPAVGGDQVNGEFQREVRHAFAEAKLAGVKNPVLCGAIPFDTHQPSALFIPQQTQWFERDAFLAGVMLPQDALPEITRQTEVPARQLFMQMVADAVQATRGDRLDKVVLSRLLEIETREPVDRQALMARIIAQNPSGFHFHVPLEQGALVGASPELLLRKSGAQFHSNPLAGSARRDADPLRDREISQQLLVSDKDLYEHKFVTEGMRQVLADRCRHLNIPSSPELLSTTTLWHLSTPIDGEAASRAENALSLACLLHPTPALCGTPTRLAHQVIKQLEPFDRGLFGGIVGWSDAEGNGEWVVTIRCGTVQGNQVRLFAGAGIVQDSSPESEWRETGTKLSTISRAFGLNQG

SEQ ID NO: 94863 - protein, 426 aa, Serratia proteamaculans
  misc_feature (1)..(426): tr|A0A1W5DMJ0|A0A1W5DMJ0_9GAMM Isochorismate synthase M enF OS=Serratia proteamaculans OX=28151 GN=menF PE=3 SV =1
MEQLSGLLRRLRQQLEQPFPAVGGFRQLSLPVPAPLADHLLEWLAAQAAFPQFYWRHRDGHEEAAVCGAVRQFSQPRQAQAFLREHEGARVWGLNAFDGMAHLFLPRLEILSRDGETQLTLNLFSASSLREDAALAGHWLEQLSVARPITPLKAQVTQVQHQPDPAGWEIMLHDALQAIGRQHMEKVVLARSTLLTLDCPLSAPAMMDASRRVNHRCYHFMLRFDADYAFLGSSPERLYLRNGRHLQTEALAGTVANHPNRQQAQALAQWLLQDGKNQHENLLVVDDICQRLQGGADAVDVLPPEVVRLRKVQHLRRRIEGRLNQGDDADCLQRLQPTAAVAGLPRQAAREFILQHEPFDRGWYAGSAGYLSSSRSEFCVSLRCAQLDDQGLWLYAGAGIVAGSDAAAEWQEIENKAAGLLSLLQP

SEQ ID NO: 94864 - protein, 402 aa, Serratia quinivorans
  misc_feature (1)..(402): tr|A0A380AFA3|A0A380AFA3_9GAMM Isochorismate synthase e ntC OS=Serratia quinivorans OX=137545 GN=entC PE=4 SV=1
MSVTLNSTGQKKPQSKDSEQAAANVSPTSGFFFTSPFRSLSTQGCFAKITMPAHNGDQLNGEFQQAVQHAFAEAKLAGVKNPVLCGAIPFDTHQPSALFIPQQTQWFERDAFLAGVTSPQDALPEIIRQNEVPAQQPFMQMVADAVEATRGDQLDKVVLSRLLEIETREPVDRQALMARIIAQNPHGFHFHVPLEQGALLGASPELLLRKSGAQFYSNPLAGSARRDADPQRDLEVSQQLLVSEKDRYEHQFVTEGMRQVLADRCRYLNIPTVPELLSTTTLWHLSTPIDGEAASRAENALSLACLLHPTPALCGTPTALAHQVIKQLEPFDRGLFGGIVGWCDAEGNGEWVVTIRCGTVQGNQVRLFAGAGIVQDSSPESEWHETGTKLSTISRAFGLNQG

SEQ ID NO: 94865 - protein, 281 aa, Serratia rubidaea
  misc_feature (1)..(281): tr|A0A4U9HM72|A0A4U9HM72_SERRU Menaquinone-specific iso chorismate synthase OS=Serratia rubidaea OX=61652 GN=me nF_2 PE=4 SV=1
MEHISALLQQLRQRLAQPFPDAAGFRQISLPVSDACSDDLLAWLAAQSTFPQFYWRHRDEQEEVAVCGALRQFSDAAAAQAFIAAHPTARVWGLTAFDGPSCLFLPRLAWQRRDKRASLTLNLFTENAAETADWLATLAPATPIAPLRTTVETVAHYPDAAGWTQMLQQALTAIAAERLEKVVLARCSRLTLAQPLPAPALMAASRRVNHRCYHFMLRFSAGSAFLGSSPERLYLRDGRRLLTEALAGTVANDGDDARAQQLAQWLLDDRKNQHEKPAGGG

SEQ ID NO: 94866 - protein, 430 aa, Serratia sp.
  misc_feature (1)..(430): tr|A0A2V1HDT6|A0A2V1HDT6_9GAMM Isochorismate synthase M enF OS=Serratia sp. S1B OX=2233853 GN=menF PE=3 SV=1
MKQLSGLLRQLSQQLEQDFPLEAGFRQITLAVPGHLTVLLLEWLAAQRLFPQFYWCHRDGQQEVAVCGSARQFAQPSQAQAFVDAHPQVRLWGLNAFDGDSLLLLPRLEIFSCKGKGELTLNLFSEHALQEDARAARAWLGNLLVAKPIAGLQVKVRSVQHQPARSGWEIMLNDALKAIKSQQMDKVVLARSSLLTLDSPLFAPALMAASRRVNHQCYHFMLRIDAHSAFLGSSPERLYRREGHNLFTEALAGTVSNHQNEQQAQALAQWLLQDSKNQQENLLVVDDICQRLQGGASAVDVLPPEVVRLRKVQHLRRRIEAQLNGSDDADCLLRLQPTAAVAGLPRQAARDFIRQHEPFSRHWYAGSAGYLSATQAEFCVALRSCQVEGAEIQLYAGAGIVAGSDPTQEWQEVESKEAGLRTLLQPEEES

SEQ ID NO: 94867 - protein, 401 aa, Serratia symbiotica
  misc_feature (1)..(401): tr|A0A068YVL2|A0A068YVL2_9GAMM Isochorismate synthase 1 OS=Serratia symbiotica OX=138074 GN=entC PE=4 SV=1
MSITAKGTSLQALQNSVAKQCCTDISPTSGFFFTSPFRSLITAGCFTQVTQPAAEGGDLQGKFQQQVRQAFAEARVAGIKQPLLCGAIPFDTQQPSALFIPYESRCFDRAAFVAGLSPLATGPEIASIAEVPTQQSFMQMVSDAVVAMKTEQLDKVVLSRLLEIETCQPVDCHALMARVIVQNPHGFHFHVPLERGALLGASPELLLRQSNGRFYSNPLAGSARRVADAECDLVVGQQLMASKKDRHEHRIVTEGIRQVLASRSHYLNVPQFPELLTTTTLWHLSTPIDGEVASRDESALSLACLLHPTPALCGMPAAAAHALIKQLEPFDRGLFGGIVGWCDAVGNGEWVVTIRCGTVDGNQVRLFAGAGIVPGSSPESEWHETDTKLSTILRAFGLHQG

SEQ ID NO: 94868 - protein, 401 aa, Serratia ureilytica
  misc_feature (1)..(401): tr|A0A5C7BHY3|A0A5C7BHY3_9GAMM Isochorismate synthase O S=Serratia ureilytica OX=300181 GN=FOT63_24105 PE=4 SV= 1
MVTAVNDINRKEMQEREEHRFAADFSPASGFFFTSPYRSLTTTGCFSRIRLPAADGADLNGEFQRRVRQAFAEARQAGIKKPLLCGAIPFDTRQPSALFVPQQSRWFDRAAFMAGVRPSANGPELAGVTELPPQQTFMNMVSDAVAAMKAGELDKVVLSRLLEIETRQPVDRHALMARVIAQNPHGFHFHVPLEQGALLGASPELLLRQDGGRFYSNPLAGSARREADPQRDREVGERLMASAKDRHEHRIVTESMRDVLAGRCRYLNVPHTPELLTTTTLWHLSTPIDGEAASPDENALSLACLLHPTPALCGMPTAEAHALIGKLEPFDRGLFGGIVGWCDDEGNGEWVVTIRCGTVDGNRVRLFAGAGIVEDSSPESEWHETGTKLSTILRAFGMNQG

SEQ ID NO: 94869 - protein, 452 aa, Shewanella algae
  misc_feature (1)..(452): tr|A0A1S2TVE5|A0A1S2TVE5_9GAMM Isochorismate synthase M enF OS=Shewanella algae OX=38313 GN=menF PE=3 SV=1
MSALTLSQAISSLQDKLCQLTKPTPAEPIVQLAAEVQAIPLISWLASQPSYPRIYWQGRDRLEEVAAIGSCLDFRFEDEVTDEALAEVYETQRAYSSNQEIRYYGGVAFDREIASWPEFGRARFLLPRIELRRSSDHFRLLVNLNLGQADQQQEIAQAQAALDALVPARPMTPPTKTEQLSRNDRPDYPRWKALVEQVTAPRFNQDTPKVVLSRLTQLQVKDTPDPWQVLASWQGRNPNSFQFGFEFSPERSFISCSPERLYRRQQQELYTEALAGTTVRGLSPEEDERLAQQLLDDNKNSHENQLVREHIVKALTPLSRYVGADETPTIFKLNHIQHLHRSIRAELRHGVKDFQLLQALHPTPAVGGLPRESAISFLRQREGYMRGWYAGACGYLNKYESEFAVAIRCALLEPGCINLFAGAGIVAGSDPAAEWQELENKLATIMSILLDF

SEQ ID NO: 94870 - protein, 452 aa, Shewanella amazonensis
  misc_feature (1)..(452): tr|A1S1T6|A1S1T6_SHEAM Isochorismate synthase MenF OS=S hewanella amazonensis (strain ATCC BAA-1098 / SB2B) OX= 326297 GN=menF PE=3 SV=1
MSVMSLPDALLSLEAKIQHLSTTQGSEPLVQLTEAVPALPLISWLASQELYPRIYWHGRDKEEEVAAIGCTCDFFFDDQVADQQLAEVYQRQRALSYNQNFRYYGGVAFDREVEGWPEFGRARFVLPRIELRRSGKEFKLLLNLNFDGNDRHAECQAALQALSSLKRPKPLTPPGKVNLLGRSEYPEYPRWQQLVEQVTADKFNRHTPKVVLSRLSQLEINDPVDPWMVLACWQGRCPSSFQFGFQFSKDRTFISCSPERLYLRRGQELFTEALAGTTLRGHTEEEDALLAKQLQEDSKNSHENQLVRQHIVEHLSPLSHYVGAEESPRIFKLPHIQHLHRAIRAELKPGINDFQLLLALHPTPAVGGLPRPSALSFIRQQEGYNRGWYAGACGYLNRHESEFSVAIRSALIEPGRINLFAGAGIVAGSDPEAEWQELDNKLATILSILVEL

SEQ ID NO: 94871 - protein, 452 aa, Shewanella atlantica
  misc_feature (1)..(452): tr|A0A3S0IND2|A0A3S0IND2_9GAMM Isochorismate synthase M enF OS=Shewanella atlantica OX=271099 GN=menF PE=3 SV=1
MTAFPLSQAISSLTDKLKQLKFQSHSDPIIQVSVPISAMPAIAWLAAQPIYPRIYWKGRDTEEEVAAIGSCKDFTYEEAVDDNQLSLEYQKQRALSNNQDIRYYGGVAFDRTTECWPEFGRAHFVLPRIELRRSGEEYKLLINLNCESNEPEAERALAIEALAKLVSPRPLPPPNKINLLSRSDRPDRYHWTELVKKVTHEKFIQDTPKVVLSRLTQLEVDEEVDPWMLLACWQGRNQNSFQFGFQFSPERAFISCTPERLYRRRQRELFTEALAGTTTRGLNQEEDRALAQQLLEDNKNSHENQLVKEHIVDALTPLSNYVGAEETPRVFKLSHIQHLHRSIRAELKPGIDDFQLLQALHPTPAVGGLPKEPAMNFIRQREGYARGWYAGACGYFNKYESEFAVAIRSALIEPGRINLFAGAGIVSGSEPEAEWVELENKLTTILSILTEL

SEQ ID NO: 94872 - protein, 452 aa, Shewanella baltica
  misc_feature (1)..(452): tr|A0A165KQ07|A0A165KQ07_9GAMM Isochorismate synthase M enF OS=Shewanella baltica OX=62322 GN=menF PE=3 SV=1
MPVHALSEDLKSLIDKLIQLKQVPPTEPIVQLSLNTVAMPLISWLASQTQFPRIYWHGRDRIEEVAAIGACKDFRFETGINDQQLAMAYQEQRALSTNQNIRYYGGVAFDRTIESWPEFGNSRFILPRIEFRRSGSRFSLLVNLNFAENDHHSEIDKAIAAIEAVMPAKPLSPPKKIVPLGRSDKPDFERWKTLVEQVVEPKFNQDTPKVVLSRLTQLEVNEPIDPWMVLACWQGRNPNSFQFGFQFSPERTFISCSPERLFRRRQQELFTEALAGTTVRGLSQEEDIALANALLEDNKNSVENQLVRSHIVNMLTPLSNYVGADELATIFKLNHIQHLHRAIRAELKPGVNDFQLLQALHPTPAVGGLPRHSALNFIRQREGYTRGWYAGACGYFNKYESEFSVAIRSALIEPGRINLFAGAGIIAGSEPEAEWQELENKLATIMSILFEM

SEQ ID NO: 94873 - protein, 448 aa, Shewanella benthica
  misc_feature (1)..(448): tr|A9CYB8|A9CYB8_9GAMM Isochorismate synthase MenF OS=S hewanella benthica KT99 OX=314608 GN=menF PE=3 SV=1
MLSQAISSLTDKLKQFNFQSPSDPIIQLSVNIKALPVIAWLSAQPIYPRIYWKGRDTEEEVSAIGSCKDFFYDEAVDDNQLAMAYQKQRALTNNQDIRYYGGVAFDRTTEPWPEFGRARFVLPRIELRRSGTEYKLLVNLNCENQDLESERQQAIESLASLAAPKPLPPPNKVSLLSRNDRPDHYHWTELVNRVTHPKFIKETPKVVLSRLTQLEVNEEINPWMLLACWQGRNPNSFQFGFQFSPDRTFISCTPERLFRRRQRELFTEALAGTTTRGLNQEEDALLAKQLMEDSKNSHENQLVKQHIVDVLTPLSNYVGAEETPKVFKLSHIQHLHRSIRAELKPGVDDFQLLLALHPTPAVGGLPKEPAMNFIRQREGYNRGWYAGACGYFNKYESEFAVAIRSALIEPGRINLFAGAGIVSGSEADAEWVELENKLATILSILTEI

SEQ ID NO: 94874 - protein, 452 aa, Shewanella bicestrii
  misc_feature (1)..(452): tr|A0A220USC6|A0A220USC6_9GAMM Isochorismate synthase M enF OS=Shewanella bicestrii OX=2018305 GN=menF PE=3 SV= 1
MPAHALSEDLKSLIDKLIQLKQVPPTEPIVQLSLTTVSIPLISWLASQNQYPRIYWHGRDKVEEVAAIGACKDFKFETGVDDDTLAEIYQQQRALTTNPEIRYYGGVAFDRSIESWPEFGNSRFVLPRIEFRRSANQFSLRVNLNFADRHPEEEIDLAITAIEAVLPARPLAPPNKLALLSRTDIPDFPRWKTLIEQVVEPKFNQETPKVVLSRHTELEVNAQVDPWMVLACWQGRNPNSFQFGFQFSPERTYISCSPERLFRRRQQELFTEALAGTTVRGLNQEEDTALANALLEDNKNSIENQLVRRHIVSMLSPLSQHVGAEETATIFKLNHIQHLHRAIRAELKQGVNDFQLLQALHPTPAVGGLPRESAMRFIREREGYMRGWYAGACGYFNKYESEFSVAIRSALIEPGKINLFAGAGIIAGSDPEAEWQELENKLATIMSILIEL

SEQ ID NO: 94875 - protein, 452 aa, Shewanella canadensis
  misc_feature (1)..(452): tr|A0A3S0KUW0|A0A3S0KUW0_9GAMM Isochorismate synthase M enF OS=Shewanella canadensis OX=271096 GN=menF PE=3 SV= 1
MAAFLLSQAISTLTDKLKQLKFQSHSDPIIQVSVPISPMPAIAWLAAQPIYPRIYWKGRDTEEEVAAVGSCKDFAYEEAVDDNQLSQAYQKQRALSNNQDIRYYGGVAFDRTTECWPEFGRAHFVLPRIELRRSGEEYKLLINLNCESNETETERTKAIEDLAKLVSPRPLPPPNKINLLSRSDRPDHYHWTELVKKVTHEKFIQDTPKVVLSRLTQLEVDEEVDPWTLLACWQGRNQNSFQFGFQFSPERAFISCTPERLYRRRQRELFTEALAGTTTRGLNQEEDRVLAQQLLEDSKNSHENQLVKEHIVDALTPLSNYVGAEETPRVFKLSHIQHLHRSIRAELKAGIDDFQLLQALHPTPAVGGLPKEPAMSFIRQREGYARGWYAGACGYFNKYESEFAVAIRSALIEPGRINLFAGAGIVSGSEPEAEWVELENKLTTILSILTEL

SEQ ID NO: 94876 - protein, 452 aa, Shewanella chilikensis
  misc_feature (1)..(452): tr|A0A2V4WEF6|A0A2V4WEF6_9GAMM Isochorismate synthase M enF OS=Shewanella chilikensis OX=558541 GN=menF PE=3 SV =1
MSALTLSQAISSLKDKLCQLAKLTPAEPIVQLAAEVQAIPLISWLASQPSYPRIYWQGRDRLEEVAAIGSCLDFRFEDEVTDEALAEVYETQRAYSSNQEIRYYGGVAFDREIASWPEFGRARFLLPRIELRRSSDYFRLLVNLNLGQGDQQQEIAQAQAALDALVPARPMTPPTKTEQLSRNDRPDYPRWKTLVEQVTAPRFNQDTPKVVLSRLTQLQVKDTPDPWQVLASWQGRNPNSFQFGFEFSPERSFISCSPERLYRRQQQELYTEALAGTTIRGLSPEEDERLAQQLLDDNKNSNENQLVREHIVKALTPLSRYVGADETPTIFKLNHIQHLHRSIRAELRHGVKDFQLLQALHPTPAVGGLPRESAISFLRQREGYMRGWYAGACGYLNKYESEFAVAIRCALLEPGCINLFAGAGIVAGSDPQAEWQELENKLATIMSILLDF

SEQ ID NO: 94877 - protein, 452 aa, Shewanella colwelliana
  misc_feature (1)..(452): tr|A0A1E5IYY3|A0A1E5IYY3_SHECO Isochorismate synthase M enF OS=Shewanella colwelliana OX=23 GN=menF PE=3 SV=1
MSVFSLSQAIQSLVSKLERLDIHQHGEPIIQVSVPVCPLPTIAWLASQPCYPRIYWRGRDTQEEVAAIGSCKDFIFEDAVDDNQLSLAYQQQRALSTNQDIRYYGGVAFDRDTDCWPEYGKAHFVLPRLELRRSGHDYKLVINLNIENEEIEQERQNALQALQQLASPSPLSPPNKIHLLSRSDRPDHRRWTELVNQVTHEKFIKQTPKVVLSRLTQLEINEKIDPWMLLASWQGRNQNSFQFGFQFSPDSAFISCTPERLYRRRQRELFTEALAGTTTRGLNEEEDAMLAQQLLDDSKNSHENQLVRKHIVDALTPLSNYVGADESPKVFKLSHIQHLHRAIRAELKGGVNDFQILQALHPTPAVGGLPKESAINFIRQREGYTRGWYAGACGYFNKHESEFAVAIRSALIEPGRINLFAGAGIVSGSEADAEWHELENKLATILSILTEV

SEQ ID NO: 94878 - protein, 452 aa, Shewanella decolorationis
  misc_feature (1)..(452): tr|A0A5B8R2X9|A0A5B8R2X9_9GAMM Isochorismate synthase M enF OS=Shewanella decolorationis OX=256839 GN=menF PE=3 SV=1
MPAHALSEDLKSLIDKLIQLKQVPPTEPIVQLSLTTVSIPLISWLASQHQYPRIYWHGRDKVEEVAAIGACKDFKFETGVDDKTLANVYEQQRALSSNPEIRYYGGVAFDRSIESWPEFGNSRFVLPRIEFRRSNNQFSLRVNLNFADSTPEEEINRAIAAIEAVMPARPLAPPNKLTLLSRNDTPDFPRWKTLVEQVVEPKFNQETPKVVLSRHTELEVNAQVDPWMVLACWQGRNPNSFQFGFQFSPDRTYISCSPERLFRRRQQELFTEALAGTTVRGLNQEEDTALANALLEDNKNSVENQLVRRHIVSMLSPLSQHVSAEEAATIFKLNHIQHLHRAIRAELKQGVNDFQLLQALHPTPAVGGLPRQSAMNFIREREGYMRGWYAGACGYFNKYESEFSVAIRSALIEPGKINLFAGAGIIAGSDPEAEWQELENKLATIMSILIEL

SEQ ID NO: 94879 - protein, 452 aa, Shewanella fodinae
  misc_feature (1)..(452): tr|A0A4R2F9I1|A0A4R2F9I1_9GAMM Isochorismate synthase M enF OS=Shewanella fodinae OX=552357 GN=menF PE=3 SV=1
MSVLSLSKAVSSLSDRLSQLFDHSQQSGILQLVEDVSLPPLMSWLAAQNQFPKIYWQGRDRREEVAAIGSCLDLSFIEAVDDSKLQQIYQQYCQQPHSVDVRFYGGVAFDRTLPSWPEFGRARFLVPRVELRRQEDSAQLLVNLNLNEQSLAQQVQQALAVLAQLCPAQPLLPPQKTEVLSRVDVPDFSRWSQLVTEVTSPAFNCHTPKVVLSRQSKLHVTQTPDPWTVLACWQGRNPTSFQFGFQFSPEHSFISCTPERLYRRRQDQLVTEALAGTTVRGLTADEDEKLAQQLLDDHKNSHENQFVGTHIVSELTPLSVQVNADEPLKIFKLNHIQHLHRVIKAQLRHDVSDFQLLQSLHPTPAVGGFPKKAALQYIAANEGYNRGWYAGTCGFLSSQLSEFAVAIRSALLEPGCINLFAGAGILTGSDPSLEWQELENKLATIMSILVDF

SEQ ID NO: 94880 - protein, 460 aa, Shewanella frigidimarina
  misc_feature (1)..(460): tr|A0A106BY05|A0A106BY05_SHEFR Isochorismate synthase M enF OS=Shewanella frigidimarina OX=56812 GN=menF PE=3 S V=1
MLLYERYRLAGHFFSSQFSELITKLEQLRNVPICDPIVQLSVEAPALPLISWLSAQTLYPKIYWHGRDRNEDVAAIGSCKTFYFADQVDDNALAQIYQQQRNKTNHQDIRYYGGLAFDRTVECWPEFGRAHFVLPRIELRRSGNHVRVLVNLNFENGEPKDEIQSALNAIAMVQKPRPLSPPNKLTLMGRSDLPNFARWKELVEQVTQANFITSTPKVVLSRHSQIDVDDNIDPWTVLACWQGRNPNSFQFGFQFSPERAFISCSPERLYLRRQQELFTEALAGTTVRGHNPEEDNVLAQALLDDIKNSHENQLVRKHIVDVLTPLSQYVGADEQPKIFKLNHIQHLHRAIRAQLKPGVNDFELLRALHPTPAVGGLPRDAALNFIRQREGYARGWYAGACGYLNHHESEFSVAIRSALIEPRRINLFAGAGIVAGSDPEAEWQELENKLATVLSILIDF

SEQ ID NO: 94881 - protein, 452 aa, Shewanella halifaxensis
  misc_feature (1)..(452): tr|B0TN19|B0TN19_SHEHH Isochorismate synthase MenF OS=S hewanella halifaxensis (strain HAW-EB4) OX=458817 GN=me nF PE=3 SV=1
MTIPLLPQAVKSLTDKIKSFTLQPNSDPIVQLSVVVSPIPVIAWLAAQSTYPRVYWKGRDTEEEVAAIGSCKDFFFGDEVDDIELSVEYQKQRALTNNQEIRYYGGVAFDRRNESWPDFGKAHFVLPRIELRRSGNDYKLLVNLNFTEQEFTQEIDDALQSLQALDAPKPLAPPNKVALMGRSDRPDRYRWDELVNRVTHPKFIEDTPKVVLSRLTQLEINEQVDPWMLLACWQGRNPNSFQFGFQFSPDSTFISCTPERLYRRRQRELFTEALAGTTIRGLNQEEDKALAQELLDDTKNSHENQLVRQHIVDVLNPLSNYVGAEETPTVFKLSHIQHLHRSIRAELKPGVNDFQLIQALHPTPAVGGLPKESAMNFIRQQEGYVRGWYAGACGYFNKYESEFAVAIRSALIEPGRINLFAGAGIVAGSEADKEWTELENKLTTILSILTEL

SEQ ID NO: 94882 - protein, 452 aa, Shewanella hanedai
  misc_feature (1)..(452): tr|A0A553JQ62|A0A553JQ62_SHEHA Isochorismate synthase M enF OS=Shewanella hanedai OX=25 GN=menF PE=3 SV=1
MAAFSLSQAISSLTDTLKKLTFQTQSDPIIQLSIPIKPVPAIAWLAAQPCYPRIYWKGRDTEEEVAAIGCCKDFFYADGIDDNQLSAEYQKQRALSNNQDIRYYGGVAFDRTTECWPEFGRAHFVLPRIELRRNGHDYKLLVNLNCDSENAESERKQAIDSLMELAPPKPLPPPNKISLLSRSDRPNRYRWTELVNQVTHQKFIKETPKVVLSRLTQLEVNQVVDPWMLLACWQGRNQNSFQFGFQFSADRTFISCTPERLYRRRQRELFTEALAGTTTRGLNLEEDDVLAQTLLEDNKNSHENRLVKDHIVGALAPLSNYVGAESCPKIFKLSHIQHLHRSIRAELKPGVDDFQLLQALHPTPAVGGLPKEPAMNFIRQSEGYARGWYAGACGYFNKHESEFAVAIRSALIEPGRINLFAGAGIVSGSEADAEWVELENKLTTILSILTEL

SEQ ID NO: 94883 - protein, 460 aa, Shewanella livingstonensis
  misc_feature (1)..(460): tr|A0A3G8LR46|A0A3G8LR46_9GAMM Isochorismate synthase M enF OS=Shewanella livingstonensis OX=150120 GN=menF PE= 3 SV=1
MLLYERRRLTGHFFSSQFSELITKIEQLRNIPICDPIVQLSVNAPALPLISWLSAQTLYPKVYWHGRDRNEDVAAIGSCKTFYFADQIDDNALAQIYQQQRSKTNHQDIRYYGGLAFDRTVECWPEFGRAHFILPRIELRRSGNHVRVLVNLNFENGETEAEIQAALDAIKTVQKPRPLSPPNKLTLMGRSDLPNFARWKELVEQVTQANFIKSIPKVVLSRHSQIDVDDNIDPWTVLACWQGRNPNSFQFGFQFSPERAFISCSPERLYLRRQQELFTEALAGTTIRGLNPDEDNLLAQALLDDIKNSHENQLVREHIVDVLTPLSQYVGADEQPKIFKLNHIQHLHRAIRAQLKPGVSDFELLRALHPTPAVGGLPRDAALNFIRQREGYARGWYAGACGYLNRHESEFSVAIRSALIEPRRINLFAGAGIVAGSDPEAEWQELENKLATVLSILIDF

SEQ ID NO: 94884 - protein, 452 aa, Shewanella loihica
  misc_feature (1)..(452): tr|A3QJ95|A3QJ95_SHELP Isochorismate synthase MenF OS=S hewanella loihica (strain ATCC BAA-1088 / PV-4) OX=3238 50 GN=menF PE=3 SV=1
MSVSSLPQAIQSLSRKLEKLDIHPQGEPIIQLSVTACVMPMIAWIASQPCYPRIYWHGRDTQEEVAALGCCKDFIFEDAVDDNQLSQAYQTQRSLSTNQEIRYYGGVAFDRHTECWPEYGRAHFILPRVELRRSGDEYKLLVNLNVESGDIEQERNLALQALAALVPPKPLAPPNKIQLLSRSDRPNKLRWHELVNQVTHDRFIQDTPKVVLSRLTQLEVNEKVDPWMLLASWQGRNQNSFQFGFQFSPESAFISCTPERLYRRRQREVFTEALAGTTTRGLNEAEDAMLAQQLLDDTKNSHENQLVREHIVDALTPLSNYVGADELAKVFKLSHIQHLHRAIRAELKPGVNDFQILQALHPTPAVGGLPKASAINFIRQREGYTRGWYAGACGYFNKYESEFAVAIRSALIEPGRINLFAGAGIVSGSEAEAEWNELENKLKTIMSILTEV

SEQ ID NO: 94885 - protein, 452 aa, Shewanella mangrovi
  misc_feature (1)..(452): tr|A0A094JHS1|A0A094JHS1_9GAMM Isochorismate synthase M enF OS=Shewanella mangrovi OX=1515746 GN=menF PE=3 SV=1
MSVTSLSQAVKSLQQRLTELTLSEVQAPVLQLKQPIDTLPLMAWLATQHSFPKIYWHGRNNDEEAAAIGSCHQFFFEQTVTDEQLASVYQQQLSCLAEPDIRYYGGIAFDRREASWPEFGRVRFILPRLELRRQDEHYQLLLNLYLAEGDAQYELARARDALQALVPAAPLAPPRKTEVLERRDTPNQQRWQQLVSMVTEPQFNADTPKVVLSRHTQLKVADAPDPWTVLASWQGRNPNSFQFGFQFSPERSFISCTPERLFQRHEHELKTEALAGTTVRGMTAAEDQLLAQQLLDDAKNSVENQFVRTHIVNELNPLSDEVDGNAPLAIFKLNHIQHLHRIIRAKLKHNVNDFQLLQAMHPTPAVGGLPKQSAMDFIREYEGYNRGWYAGACGYLSRHVSEFAVAIRSALLEPGTINLFAGAGILAGSDPQSEWQELENKLATIMSILVDF

SEQ ID NO: 94886 - protein, 452 aa, Shewanella morhuae
  misc_feature (1)..(452): tr|A0A1N7A3P6|A0A1N7A3P6_9GAMM Isochorismate synthase M enF OS=Shewanella morhuae OX=365591 GN=menF PE=3 SV=1
MPVHALSEDLKSLIDKLIQLKLTPVVEGLVQLSVSTVALPLIPWLASQTLFPRIYWHGRDRIEEVAAIGACKDIKFETAMSDQQLATIYQEQRALSTNQNIRYYGGVAFDRTIDSWPEFGNSRFILPRIEFRRSGNQFSLLVNLNFADNDHHSEIDNAIAAIEAIMPAKPLSPPKKIGLRGRTDTPNFTRWKTLVEQVIEPKFNQDTPKVVLSRLTQLDVNEPVDPWMVLACWQGRNPNSFQFGFQFSPERTFISCSPERLFRRNQQELFTEALAGTTIRGLSQEEDIALANALLEDNKNSVENQLVRSHIVNMLTPLSRYVGADELATIFKLNHIQHLHRAIHAELKTGVNDFQLLQALHPTPAVGGLPRHSAMSFIRQQEGYMRGWYAGACGYFNQYESEFSVAIRSALIEPGRINLFAGAGIIAGSDPQAEWQELENKLATIVSILFEL

SEQ ID NO: 94887 - protein, 452 aa, Shewanella oneidensis
  misc_feature (1)..(452): tr|A0A2W5E628|A0A2W5E628_SHEOE Isochorismate synthase M enF OS=Shewanella oneidensis OX=70863 GN=menF PE=3 SV=1
MPAHALSEDLKSLIDKLIQMKQVPASEPIVQLSLTTVSIPLISWLASQTQYPRIYWHGRDKIEEVAAIGACKDIKFETGVQDNELASVYERQRVLSSNPDIRYYGGVAFDRSIESWPEFGNSRFVLPRIEFRRSADQFSLRVNLNFADNNPIDEIDLAIAAIEAVMPARPLAPPNKLTLESRQDIPDFPRWKTLVEQVVEPEFNQDTPKVVLSRLTELKVNEQVDPWMVLACWQGRNPNSFQFGFQFSPERTYISCSPERLFRRRRQQLFTEALAGTTVRGLNKEEDVALANALLEDNKNSVENQLVRRHIVNMLTPLSQYVGAEEAATIFKLNHIQHLHRAIRAELKPGVNDFQLLQALHPTPAVGGLPRESAMKFIRQREGYMRGWYAGACGYFNQDESEFSVAIRSALIEPGKINLFAGAGIIAGSDPKAEWQELENKLATIMSILIEL

SEQ ID NO: 94888 - protein, 452 aa, Shewanella pealeana
  misc_feature (1)..(452): tr|A8HA12|A8HA12_SHEPA Isochorismate synthase MenF OS=S hewanella pealeana (strain ATCC 700345 / ANG-SQ1) OX=39 8579 GN=menF PE=3 SV=1
MTIPLLPQAIKSLTDKIKSFTLQPNSDPIAQLSVVISPIPVIAWLSAQTTYPRVYWKGRDTEEEVAAIGCCKDFFFNDDVDDIELAAEYQKQRALTSNQEIRYYGGVAFDRRNESWPEFGKAHFVLPRIELRRSGNEYRLLVNLNFSENSFAEEIELAVQSLQKLDSPKPLSPPNKVALMGRSDRPDRYRWNELVNRVTHPKFIQDTPKVVLSRVTQLEINEEVDPWMLLACWQGRNPNSFQFGFQFSPESAFISCTPERLYRRRQRELFTEALAGTTVRGLNQEQDKALAQALLDDSKNSHENQLVRQHIVDVLNPLSNYVGAEETPTIFKLSHIQHLHRSIRAELKAGVSDFQVIQALHPTPAVGGLPKESAMSFIRQQEGYVRGWYAGACGYFNKYESEFAVAIRSALIEPGRINLFAGAGIVAGSEADKEWVELENKLTTILSILTEL

SEQ ID NO: 94889 - protein, 452 aa, Shewanella piezotolerans
  misc_feature (1)..(452): tr|B8CVB2|B8CVB2_SHEPW Isochorismate synthase MenF OS=S hewanella piezotolerans (strain WP3 / JCM 13877) OX=225 849 GN=menF PE=3 SV=1
MTAPLLSHAIKSLTDKLTSFTLQPHSDPIIQLSVTVSAIPVIAWLAAQSTYPRIYWKGRDTEEEVAAIGCCKDFFFGDDVDDLEMSAEYQKQRALTNNQDVRYYGGVAFDRKNESWPEFGKARFILPRIELRRSGNEFKLLVNLNFTENSFEEEIAYALHAIASLDKPKPLAPPNKVALMGRSDKPDRYRWTELVNQVTHPKFIKETPKVVLSRQTQLEINEQVDPWTLLACWQGRNPNSFQFGFQFSPESAFISCTPERLYRRRQRELFTEALAGTTVRGINQEQDKALAQELLDDTKNSHENQLVRQQIVDVLNPLSHYVGAEEFPTVLKLSHIQHLHRSIRAELKAGVNDFQLIQALHPTPAVGGLPKEPAMNFIRQQEGYVRGWYAGACGYFNKHESEFAVAIRSARIEPGRINLFAGAGIVTGSEADKEWSELENKLTTILSILTEL

SEQ ID NO: 94890 - protein, 452 aa, Shewanella psychrophila
  misc_feature (1)..(452): tr|A0A1S6HIP5|A0A1S6HIP5_9GAMM Isochorismate synthase M enF OS=Shewanella psychrophila OX=225848 GN=menF PE=3 S V=1
MAALILSQAISSLTDKLKQFNFQSPSDPIIQLSVSIKAIPAIAWLSAQPIYPRIYWKGRDTEEEVSAIGNCKDFFYEEASDDNQLAMAYQEQRALSNNQDIRYYGGVAFDRTTESWPEFGRARFVLPRIELRRSGTEYKLLVNLNCENQDTESERRNAIDSLASLAAPKPLPPPNKVSLLGRNDRPDRYHWTELVNKVTHPKFIKETPKVVLSRLTQLEINEEINPWMLLACWQGRNPNSFQFGFQFSPDSTFISCTPERLFRRRQRELFTEALAGTTTRGLNQEEDALLATQLMKDSKNSHENQLVRQHIVDVLTPLSNYVGAEETPKVFKLSHIQHLHRSIRAELKPGVDDFQLLLALHPTPAVGGLPKEPAMNFIRQREGYNRGWYAGACGYFNKYESEFAVAIRSALIEPGRINLFAGAGIVSGSEADAEWVELENKLTTILSILTEL

SEQ ID NO: 94891 - protein, 452 aa, Shewanella putrefaciens
  misc_feature (1)..(452): tr|A4YC96|A4YC96_SHEPC Isochorismate synthase MenF OS=S hewanella putrefaciens (strain CN-32 / ATCC BAA-453) OX =319224 GN=menF PE=3 SV=1
MPVHALSKDLKSLIDKLIQLKQVSPTEPIVQLSITTVSMPLISWLASQTQYPRIYWHGRDRIEEVAAIGACKDFRFETGVDDQQLAMVYQQQRALSTNQDIRYYGGVAFDRTIESWPEFGNSRFVLPRIEFRRSGTHFSLRVNLNFADNAPHTEIDNAIAAIEAVMPAKPLAPPTKLALLGRSDRPDFQRWKTLVEQVVDPKFNADTPKVVLSRLTQLEVNEPVDPWMVLACWQGRNPNSFQFGFQFSPERTFISCSPERLFRRRQQELFTEALAGTTVRGLNQEEDIALANALLEDNKNSVENQLVRSHIVNMLTPLSHYVGADELATIFKLNHIQHLHRAIRAELKAGVNDFQLLQALHPTPAVGGLPRHSAMNFIRQREGYMRGWYAGACGYFNKYESEFSVAIRCTLIEPGRINLFAGAGIIAGSDPEAEWQELENKLATIMSILIEL

SEQ ID NO: 94892 - protein, 414 aa, Shewanella sediminis
  misc_feature (1)..(414): tr|A8FPH0|A8FPH0_SHESH Isochorismate synthase MenF OS=S hewanella sediminis (strain HAW-EB3) OX=425104 GN=menF PE=3 SV=1
MPAIAWLAAQPIYPRIYWKGRDTEEEVAAVGSCKDFAYEEAVDDNQLSLEYQKQRALSNNQDIRYYGGVAFDRTTECWPEFGRAHFVLPRIELRRSGEEYKLLINLNCESNDTETERTKAIEDLAKLVFPSPLSPPNKINLLSRSDRPDHYHWTELVKKVTHEKFIQDTPKVVLSRLTQLEVDEEVDPWTLLACWQGRNQNSFQFGFQFSPERAFISCTPERLYRRRQRELFTEALAGTTTRGLNQEEDRVLAQQLLEDSKNSHENQLVKEHIVDALTPLSNYVGAEETPRVFKLSHIQHLHRSIRAELKPGIDDFQLLQALHPTPAVGGLPKEPAMSFIRQREGYARGWYAGACGYFNKYESEFAVAIRSALIEPGRINLFAGAGIVSGSEPEAEWVELENKLTTILSILTEL

SEQ ID NO: 94893 - protein, 452 aa, Shewanella sp.
  misc_feature (1)..(452): tr|A0A1Z4AEX4|A0A1Z4AEX4_9GAMM Isochorismate synthase M enF OS=Shewanella sp. FDAARGOS_354 OX=1930557 GN=menF P E=3 SV=1
MPAHALSEDLKSLIDKLIQMKQVPASEPIVQLSLTTVSIPLISWLASQTQYPRIYWHGRDKIEEVAAIGACKDIKFETGVQDNELASVYERQRVLSSNPDIRYYGGVAFDRSIESWPEFGNSRFVLPRIEFRRSADQFSLRVNLNFADNNPIDEIDLAIAAIEAVMPARPLAPPNKLTLVSRQDIPDFPRWKTLVEQVVEPEFNQDTPKVVLSRLTELKVNEQVDPWMVLACWQGRNPNSFQFGFQFSPERTYISCSPERLFRRRRQQLFTEALAGTTVRGLNKEEDVALANALLEDNKNSVENQLVRRHIVNMLTPLSQYVGAEEAATIFKLNHIQHLHRAIRAELKPGVNDFQLLQALHPTPAVGGLPRESAMKFIRQREGYMRGWYAGACGYFNQDESEFSVAIRSALIEPGKINLFAGAGIIAGSDPEAEWQELENKLATIMSILIEL

SEQ ID NO: 94894 - protein, 448 aa, Shewanella violacea
  misc_feature (1)..(448): tr|D4ZDG9|D4ZDG9_SHEVD Isochorismate synthase MenF OS=S hewanella violacea (strain JCM 10179 / CIP 106290 / LMG 19151 / DSS12) OX=637905 GN=menF PE=3 SV=1
MLPQAIEYLTDKLQQLNFQSHCDPIIQVSVNIKAVPVIAWLAAQPIYPRIYWKGRDTEEEVAAIGCCKDFFYDETTDDNQLAMEYQAQRALTKNQDIRYYGGVAFDRSTEAWPEFGRARFVLPRVELRRSGTEFKLVVNLNCDKQDTQSERRHAMESLGSLAPAKPLPPPNKVSLLGRSDRPDRHHWTELVNRVTDPKFIHETPKVVLSRLTQLEVNEEINPWMLLACWQGRNPSSFQFGFQFSPNRTFISCTPERLYRRRHRELFTEALAGTTTRGLNQEEDALLATQLQEDSKNSHENQLVSQHIVDVLSPLSRYVGAEESPKVFKLSHIQHLHRSIRAELKPEVDDFQLLLAMHPTPAVGGLPREAAMDFIRQQEGYARGWYAGACGYFNHYESEFAVAIRSALIEPGRINLFAGAGIVSGSEADAEWAELENKLTTILSILTEV

SEQ ID NO: 94895 - protein, 452 aa, Shewanella woodyi
  misc_feature (1)..(452): tr|B1KL53|B1KL53_SHEWM Isochorismate synthase MenF OS=S hewanella woodyi (strain ATCC 51908 / MS32) OX=392500 G N=menF PE=3 SV=1
MAVYSLSQAIASLTDTLKQLKFQTQSDPIIQLSVSIKPVPAIAWLAAQPCYPRIYWKGRDTEEEVAAIGCCKDFFYADNIDDNQLSIEYQKQRALSNNQDIRYYGGVAFDRTTECWPEFGRAHFVLPRVELRRHGNDYKLLVNLNCETGNAESERDQAMTSLAQLASPKPLPPPNKINILSRSDRPDRYRWTELVNQVTHQKFIQETPKVVLSRLTQLEINQPVDPWMLLACWQGRNKNSFQFGFQFSPDSTFISCTPERLYRRRQRELFTEALAGTTTRGLNLEEDKVLAQTLMEDNKNSHENRLVKDHIVDALTPLSNYVGAESIPKVFKLSHIQHLHRSIRAELKPGVDDFQLLQALHPTPAVGGLPKEPAMSFIRQSEGYARGWYAGACGYFNKYESEFAVAIRSALIEPGRINLFAGAGIVSGSEADSEWIELENKLTTILSILTEL

SEQ ID NO: 94896 - protein, 452 aa, Shewanella xiamenensis
  misc_feature (1)..(452): tr|A0A1E3UXK4|A0A1E3UXK4_9GAMM Isochorismate synthase M enF OS=Shewanella xiamenensis OX=332186 GN=menF PE=3 SV =1
MPAHALSEDLKSLIDKLIQMKQVPASEPIVQLSLTTVSIPLISWLASQTQYPRIYWHGRDKIEEVAAIGACKDIKFETGVQDNELASVYEGQRVLSSNPDIRYYGGVAFDRSIESWPEFGNSRFVLPRIEFRRSADQFSLRVNLNFADNNPIDEIDLAIAAIEAVMPARPLAPPNKLTLVSRQDIPDFPRWKTLVEQVVEPEFNQDTPKVVLSRLTELKVNEQVDPWMVLACWQGRNPNSFQFGFQFSPERTYISCSPERLFRRRRQQLFTEALAGTTVRGLNKEEDVALANALLEDNKNSVENQLVRRHIVNMLTPLSQYVGAEEAATIFKLNHIQHLHRAIRAELKPGVNDFQLLQALHPTPAVGGLPRESAMKFIRQREGYMRGWYAGACGYFNQDESEFSVAIRSALIEPGKINLFAGAGIIAGSDPEAEWQELENKLATIMSILIEL

SEQ ID NO: 94897 - protein, 56 aa, Shigella boydii
  misc_feature (1)..(56): tr|I6DSK7|I6DSK7_SHIBO Isochorismate synthase entC doma in protein OS=Shigella boydii 965-58 OX=766138 GN=SB965 58_0857 PE=4 SV=1
MNGDSPDSPFQQKLAALFADAKAQGIKNPVMVGAIPFDPRQPSSLYIPESWQSFSR

SEQ ID NO: 94898 - protein, 431 aa, Shigella dysenteriae
  misc_feature (1)..(431): tr|B3X1V2|B3X1V2_9ENTR Isochorismate synthase MenF OS=S higella dysenteriae 1012 OX=358708 GN=menF PE=3 SV=1
MQSLTTALENLLRHLSQEIPATPGIRVIDIPFPLKDAFDALSWLASQQTYPQFYWQQRNGNEEAAVLGAITRFTSLDQAQRFLRQHPEHADLRIWGLNAFDSSQGNLLLPRLEWRRCGGKATLRLTLFSESSLQHDAIKAKEFIVTLVSIKPLPGLHLTTTREQHWPDKTGWTQLIELATKTIAEGELDKVVLARAIDLHFASPVNAAAMMAASRRLNLNCYHFYMAFDGENAFLGSSPERLWRRRDKALRTEALAGTVANHPDDKQAQQLGEWLMADDKNQRENMLVVEDICQRLQADTQTLDVLPPQVLRLRKVQHLRRCIWTSLNKADDVICLHQLQPTAAVAGLPRDLARQFIARHEPFTREWYAGSAGYLSLQQSEFCVSLRSAKISGNVVRLYAGAGIVRGSDPEQEWQEIDNKAAGLRTLLQME

SEQ ID NO: 94899 - protein, 431 aa, Shigella flexneri
  misc_feature (1)..(431): tr|A0A4P7TK84|A0A4P7TK84_SHIFM Isochorismate synthase M enF OS=Shigella flexneri serotype 5a (strain M90T) OX=1 086030 GN=menF PE=3 SV=1
MQSLTTALENLLRHLSQEIPATPGIRVIDIPFPLKDAFDALSWLASQQTYPQFYWQQRNGDEEAAVLGAITRFTSLDQAQRFLRQHPEHADLRIWGLNAFDPSQGNLLLPRLEWRRCGGKATLRLTLFSESSLQHDAIQAKEFIATLVSIKPLPGLHLTTTREQHWPDKTGWTQLIELATKTIAEGELDKVVLARATDLHFASPVNAAAMMAASRRLNLNCYHFYMAFDGENAFLGSSPERLWRRRDKALRTEALAGTVANHPDDKQAQQLGEWLMADDKNQRENMLVVEDICQRLQADTQTLDVLPPQVLRLRKVQHLRRCIWTSLNKADDVICLHQLQPTAAVAGLPRDLARQFIARHELFTREWYAGSAGYLSLQQSEFCVSLRSAKISGNVVRLYAGAGIVRGSDPEQEWQEIDNKAAGLRTLLQME

SEQ ID NO: 94900 - protein, 431 aa, Shigella sonnei
  misc_feature (1)..(431): tr|A0A200LES8|A0A200LES8_SHISO Isochorismate synthase M enF OS=Shigella sonnei OX=624 GN=menF PE=3 SV=1
MQSLTTALENLLRHLSQEIPATPGIRVIDIPFPLKDAFDALSWLASQQTYPQFYWQQRNGDEEAAVLGAITRFTSLDQAQRFLRQHPEHADLRIWGLNAFDPSQGNLLLPRLEWRRCGGKATLRLTLFSESSLQHDAIQAKEFIATLVSIKPLPGLHLTTTREQHWPDKTGWTQLIELATKTIAEGELDKVVLARATDLHFASPVNAAAMMAASRRLNLNCYHFYMAFDGENAFLGSSPERLWRRRDKALRTEALAGTVANHPDDKQAQQLGEWLMADDKNQRENMLVVEDICQRLQADTQTLDVLPPQVLRLRKVQHLRRCIWTSLNKADDVICLHQLLPTAAVAGLPRDLARQFIARHEPFTREWYAGSAGYLSLQQSEFCVSLRSAKISGNVVRLYAGAGIVRGSDPEQEWQEIDNKAAGLRTLLQME

SEQ ID NO: 94901 - protein, 431 aa, Shigella sp.
  misc_feature (1)..(431): tr|A0A3D1C3Z1|A0A3D1C3Z1_9ENTR Isochorismate synthase M enF OS=Shigella sp. OX=625 GN=menF PE=3 SV=1
MQSLTTALENLLRHLSQEIPATPGIRVIDIPFPLKDAFDALSWLASQQTYPQFYWQQRNGDEEAAVLGAITRFTSLDQAQRFLRQHPEHADLRIWGLNAFDPSQGNLLLPRLEWRRCGGKATLRLTLFSESSLQHDAIQAKEFIATLVSIKPLPGLHLTTTREQHWPDKTGWTQLIELATKTIAEGELDKVVLARATDLHFASPVNAAAMMAASRRLNLNCYHFYMAFDGETAFLGSSPERLWRRRDKALRTEALAGTVANNPDDKQAQQLGEWLMADDKNQRENMLVVEDICQRLQADTQTLDVLPPQVLRLRKVQHLRRCIWTSLNKADDVICLHQLQPTAAVAGLPRDLARQFIARHEPFTREWYAGSAGYLSLQQSEFCVSLRSAKISGNVVRLYAGAGIVRGSDPEQEWQEIDNKAAGLRTLLQME

SEQ ID NO: 94902 - protein, 433 aa, Shimwellia blattae
  misc_feature (1)..(433): tr|I2B783|I2B783_SHIBC Isochorismate synthase MenF OS=S himwellia blattae (strain ATCC 29907 / DSM 4481 / JCM 1 650 / NBRC 105725 / CDC 9005-74) OX=630626 GN=menF PE=3 SV=1
MNSVVTALSELQQKLIAPLPDSSGTLVFTVPLTLSDDSDALQWLAAQSVWPQFYWQQRNGEQELAALGAVAHFPSLSAGEAFLAQFPASERLLICGLNQFDPASGSLFLPRLLWQRQRGQAALTLILHSEHSLAQDGLQAQALLAALLPARPLPALQLTLLREQQTPAWPRWQQLIEQALAGFSRGEMEKVVLARASDLWFSTPVSAAGFLAASRRVNLNCYHFYMAFNAQQGFIGSSPERLWRRRGVELRTEALAGTVASSADDAKAARLGEWLMHDDKNQRENMLVVEDICQRLNPIGETLEVLPPQIMRLRKVQHLRRCIWTTLRQPDDASCLRQLQPTAAVAGLPRQAASAFIQHNEPFERQWYAGSAGYISRQQAEFCVSLRSALVDGDRVRLYAGAGIVPGSDPAEEWREINNKAAGLRSLLTEKSE

SEQ ID NO: 94903 - protein, 431 aa, Simkania negevensis
  misc_feature (1)..(431): tr|F8L8Z2|F8L8Z2_SIMNZ Isochorismate synthase MenF OS=S imkania negevensis (strain ATCC VR-1471 / Z) OX=331113 GN=menF PE=3 SV=1
MQKRILNLDELITKALVQTPFKPETVTLKNHTFPFMRLEIPIPGIDLLAWLEQQTLYPKIYFETPKTGFRVAGVGAAYTLDEIPSFHRLSASSRFFGGMDFYERKFETWKTFPRCRYVLPLVEIEVRHEMTYLCVNRTCEALDLSEIRFNPAPISTISQKATSRLDSPSFPVWDRNIRESLKQIQEKSLDKIVLARASLFEFEKPLSPLAFCKALQGKSPTATVFSYQFSTDQAFVGATPESLYSRTGSKVETAAIAGTRQRGKTDAEDKALQADLLENVKEMHEFNVVKEEIEKRLSPLCKALTKQNEDKIIQTSSVQHIYNLFEGELSEGIDDTSLIHALHPTPAVGGRPKEAALKEIRKWETFDRGWYAAPVGWISPEQAHILVAIRSALIHANELRLFAGTGIVPGSIPEKEWDELGHKISQFILWE

SEQ ID NO: 94904 - protein, 380 aa, Sinomicrobium pectinilyticum
  misc_feature (1)..(380): tr|A0A3N0E2J4|A0A3N0E2J4_9FLAO Isochorismate synthase O S=Sinomicrobium pectinilyticum OX=1084421 GN=ED312_1775 0 PE=4 SV=1
MLAAKNFFTQIKQQYDRGLPFVAYRKPVPENTVISGESGVIKALLQKDATLHVVKDFSEKGFVFSPFDQKGQTVLMPYSDTEILFSRLMGKTGDQGKGNKKEEEEIKTNSADREKHVTLVRKGVEAIRKGKLEKVVLSRNESVPISDNDPISIFQRLLELYRDAFCYIWYHPETGLWLGATPETLLHIRGCVLHTMALAGTRKFTGTTKVKWGEKEKQEQQVVTDSIVDSLRFRVKSLKISAAGTHRAGNLIHIKTDIQATLIPEYKTKNIAPLLHSLHPTPAVCGFPKEEAKRFIRENEGYDRSFYAGFLGELNVDITPGPVTDPHNRDSALYVNLRCMQIKGDSALLYIGGGITRDSVPESEWEETVHKSQTMKRVLR

SEQ ID NO: 94905 - protein, 395 aa, Skermanella stibiiresistens
  misc_feature (1)..(395): tr|W9H0S1|W9H0S1_9PROT Isochorismate synthase OS=Skerma nella stibiiresistens SB22 OX=1385369 GN=N825_05985 PE= 4 SV=1
MRCDFDSAASASQLLGNHRAGSPFFFASPRGTLLAQGVHSRVAGPATEPGDLPQRVARTLALARKSGHSNPAVVGAIPFDPATPAQLVVARTLHSAGRLSFDRPHQAPEPAAGDCAARMVPEPAEYRRGVETALERIAGGSPAKVVLSRTLELTSDTPISVERLLYNLARHNPQGYSFAVDLPGGRTLIGASPELLVSKSGRQVVANPLAGSAARSADPVEDQRRAEALLASAKDRHEHAVVADAVAAALRPYCRWLDVPAEPSLIQTRTLWHLSTEIRGELTDYATSSLTLASALHPTPAVCGHPTAEARALIGEVETFDRGFFTGMVGWCDAIGDGEWAVTIRCAEVEGHKLRLFAGAGIVAGSTPEKELAETGAKFRTMLNGMGIRHPVETA

SEQ ID NO: 94906 - protein, 349 aa, Skermania sp.
  misc_feature (1)..(349): tr|A0A554V2T6|A0A554V2T6_9ACTN Isochorismate synthase O S=Skermania sp. ID1734 OX=2597516 GN=FOS14_13405 PE=4 S V=1
MDGFLLARPHSVVRAQGRRAQFHHPADALKTDADVIVGALPFDPAAPAALFVPERWQQHAGPWRPEPATLPPVTLGAEIPSPAEHVDRVTKLIKLIGEGKLQKVVAARAVQVTATEPIRPLQLAAALNARHQRANTFAVTVDGGTLVGASPEVLVSRRGDTVQLCPLAGTAPRHADPADDRAEAEELLASSKNLAEHAFVVDWIRERLAPVCRELSVPDRPELTGTAEVWHLATPIHGVLDAPALTALELAVLLQPTPAVCGTPTELALQTIRDTEGDRGFYGGAVGWCDRAGDGDWIVAIRCATIAAGGRSATAYAGGGIVAASDPVGELDETTAKFATLLGAFGLHA

SEQ ID NO: 94907 - protein, 387 aa, Snodgrassella alvi
  misc_feature (1)..(387): tr|X2H7L0|X2H7L0_9NEIS Isochorismate synthase of sidero phore biosynthesis OS=Snodgrassella alvi wkB2 OX=119609 4 GN=SALWKB2_2022 PE=4 SV=1
MTITESSAVSRSPIQSQDQFACFATSQHHISARHLIHKIHMPVNQSESCNQQIADCFNHIKAQGYANPILIAAIPFDTRKNGTLNFYSEFNQTSPAHFEHNTASAGKTANSLIRKKSLVERQAFEHSVQTALSAMADKQMQKIVLSQATEFEFARQYSPEDLLNILIRQNPDAYKFMIPVEEDQYIFGASPELLLSRQQQQVRSNPLAGSRPRSAIPEYNSQTQTELYQSAKDRHEHQLVIDNIRHKLSSYCSTYQASEIPEILTTSTMFHLSSVFQGQLKADAPDALNLALHLHPTPAVCGTPTDIARDFILNHEGYNRHYYSGLNGWMDASGNGEWVVTIRNGLLNHNIIRLYAGAGIVAGSDAAAEWFETEAKMQTMLNVFQQQ

SEQ ID NO: 94908 - protein, 400 aa, Solibacillus isronensis
  misc_feature (1)..(400): tr|K1KZA7|K1KZA7_9BACL Isochorismate synthase dhbC OS=S olibacillus isronensis B3W22 OX=1224748 GN=dhbC PE=4 SV =1
MVSKQKVVIEHELLDEYEVGDFFIETPKRTILGKGVYMHVPTGEPHQNQMEGLSDRVASVLKKAKEQGHLRSVVTGAVPFDYYKKACLLVPESIQIAPSLQQEERAVSGSASVTVNRLVSNPSPEHYKLGVMQGIERIRSGELDKIVLSRSLEVSLNEPIDLPQLLRNLAYQNKHGYTFAAPIEYGNQKASLIGASPELLVSRQGMYAIANPLAGSRPRSEDPVENQRREEELLSSPKDLHEHAVVVEAVVKGLRPLLKTIEVPEKPSVVYTETMMHLSTVIKGELLKADISSLDLAIALQPTPAVCGAPTEKARQAITEIEPFDRGFFTGTIGWCDAEGDGEWVVTIRCAEAKGDSLRLFAGAGVVSESKPEEELAETGAKFQTMLRAMGIDTEQLKDI

SEQ ID NO: 94909 - protein, 417 aa, Sorangium cellulosum
  misc_feature (1)..(417): tr|A0A4V0NDL6|A0A4V0NDL6_SORCE Isochorismate synthase O S=Sorangium cellulosum OX=56 GN=SOCEGT47_036210 PE=4 SV =1
MTTTMFVPDAAERPASSAAQLLEQYSPESSFFFASPTCTLLAQGVREMKLEPERGDRLTGRVAALLAASEGARHPRPIVVGAVPFNNTSPARLIVPRTIQSAGPLGAAAVALRPRAPVSIRTLRMIPEPRDYVRGVEQAVSLMQTGALSKVVLSRMMELVLSRPIDLQDVLRRLAQHNRSGYTFAANLWESAAREPGPEGGPPAARPRTLIGASPELLVSRSGLQVVANPLAGSAARSPDPEEDRRRANALLTSRKDRHEHAIVVEAVAAALRPFCRRLHVPEAPSLTHTATMWHLATRVTGELDDLSISSMKLAMALHPTPAVCGYPAERARAAIESLEPFDRGFFTGLVGWCDAAGDGEWAVAIRCADIAGRSARLYAGAGLVVGSDGDMELAETSAKLRTMVNALGLELAPEMA

SEQ ID NO: 94910 - protein, 409 aa, Sphaerisporangium album
  misc_feature (1)..(409): tr|A0A367FA72|A0A367FA72_9ACTN Isochorismate synthase O S=Sphaerisporangium album OX=509200 GN=DQ384_28485 PE=4 SV=1
MSVALGITRPPLVRSVPVHHAEDLIARLPQAPPYAWVHQGEGLVAWGEAARVSVPPGAGRFDWARRWLAEVFGEAHIDDDVHVPGSGPVAFGSFTFDPDAAGSVLVVPRVVLGRRNGRAWLTTVGEPPIDLVAPAVPPGRVVYGDGSLSAPGWQHAVARAVKDIRAGRLEKVVLARDLLATAEREIDPRVLLERLARAYPDCYTFSCAGLVGATPELLVRHTGESIESLVLAGTTYRGATPAGDRAQAAALFASAKDRHEHACAVASVRDALTPLCASLSVPEEPELLVLPNVQHLASRVRGRLADGASVLDVVAAMHPTAAVGGTPTPVALEVIRELEGMDRAGYAGPVGWIDARGDGEWGIALRCAYVEGRRARLFAGCGIMGGSDPEAELAEAQAKFRVMRYALEG

SEQ ID NO: 94911 - protein, 386 aa, Sphaerisporangium sp.
  misc_feature (1)..(386): tr|A0A366LQ91|A0A366LQ91_9ACTN Isochorismate synthase O S=Sphaerisporangium sp. LHW63015 OX=2248750 GN=DP939_32 695 PE=4 SV=1
MTISYEPVTASELLGEYRPGRSSLFSSPQHTLLAQGVGDVVGPAGTLRALEEQVRDAGRLVLGAVPFDDPASAHLVMPERVRWADPFIARPVAPDVPPRPWRITPVPGPDAHLAGVRRALRLLDQGRLDKVVLARSLELSHPDPPDVTTMVERLAARDPDGHIFAVPLPGRRTLVGASPELLVSRSGPIVVAGPMAGSAARSADPAEDRRRAAALLCSAKDQREHALVTQAVADALAPFCRALSVPDEPSLSCTSTMWHLSSRITGRLADPETTALGLAVAMHPTPAVCGTPTADARAAIAEIEPFDRGFYTGMVGWCDASGDGEWAVTIRCAELSQDGIRLFAGGGIVPGSVPEDELAETTAKFRTLMDALGLDERAALAVSAGE

SEQ ID NO: 94912 - protein, 472 aa, Sphaerobacter thermophilus
  misc_feature (1)..(472): tr|D1C9D4|D1C9D4_SPHTD Isochorismate synthase OS=Sphaer obacter thermophilus (strain DSM 20745 / S 6022) OX=479 434 GN=Sthe_3025 PE=4 SV=1
MTERIDTEQVLAPLLARARRLAAERGAPVLVSWSERVAAEDPIDVFAQAATASDRCLWLQPDADFALVGVGAAHVIEPTGPERFAAADAAWRALLDGALIVGDGPGPTVIGGFAFDPERPSTPRWCGFPDARLILPRQTLTLQGGECWRRVNVVVGDRHPSPPTPLPTLGEGSIEHDGMPSTQSAPDSPSPNVGRGGQGVRAVPRFLTAVAQAAAAVRRGDLEKVVLAREVRVEAEEPFDVEAALRRLRDAYPSCYVFAVARGERVFLGATPERLVRLDGRTVRVASLAGSIPRGATPEEDRELAAALLASAKDRAEHAVVVRAIRTALDGPCVEVETPDEPEILSVRNVHHLYTPVTARLRDGATLMDLVARLHPTPAVGGTPRAEALRYIREHEGLDRGWYAAPVGWMDASGQGEFAVALRSALVEGAEASLFAGCGIMGDSDPEREYAESSVKLRPMLAALGIEGAETE

SEQ ID NO: 94913 - protein, 445 aa, Spirosoma sp.
  misc_feature (1)..(445): tr|A0A515AAE5|A0A515AAE5_9BACT Isochorismate synthase O S=Spirosoma sp. KCTC 42546 OX=2520506 GN=EXU85_22200 PE =4 SV=1
MQPEYKVDSSSTSQLAETQRTAQPNASDIWETALTLGLPAALWRLPNNQDKHLIVSFDEILPRVSADLDELPAGFLVSPFDNLAKDAPVEALLAEHLDTTGSVPQTLFLRADIQAIFPESGPSSVKQNEHTTASVETTDQFWHELSVRSTHKTSRKTTSESPTPVLDPTIGVVYERNVKEAVESIKRGELRKVVLARTKQVLFTDAPNAIELFDKLCQKYPTAFVSAVSIPERGQIWMSATPERLVSMSADGIFQTASLAGTQSAFHPDGTAKQPSKAMWSQKEIEEQAIVSRYIIECFKKIRLREYIEEGPKTIIAGNLMHLGTSYTVDTQAVRYPQLGTVMLRLLHPTSAVCGTPRNAAFTFIRQHEPHDRELYSGFLGPVNINANNEGPTSSIFVHIRCMKLEGKLATLYAGAGITEDSEPEQEWQETEMKCQTLLKVMYNE

SEQ ID NO: 94914 - protein, 276 aa, Sporolactobacillus inulinus
  misc_feature (1)..(276): tr|A0A4Y1ZA50|A0A4Y1ZA50_9BACL Isochorismate synthase O S=Sporolactobacillus inulinus OX=2078 GN=NBRC111894_134 5 PE=4 SV=1
MIYLIGNVTSLSETVHAAIDHARRSHQSCVVSKIEELNRILPLDFYQRAGRSYSGQRCYWSDSSGELQLVGAGITAMIATQSEDAAVQVRQAQARLFRNAYTVGAQHVAGTGAVFLGGFAFDSKKERSAMWQEFGSAYFILPEFLLTVHRGHCYFTHTILCRPNDDAAERVGALEAQPNELFDNGFHAATDTHDQQLLDQKDLDQDTWCRLVAKAVQTMQETPMKKIVLARARSLIFQRQLSSHALLRVLSEEQKGTCIFAWKRVRQHLSGQRRND

SEQ ID NO: 94915 - protein, 473 aa, Sporolactobacillus shoreae
  misc_feature (1)..(473): tr|A0A4Z0GJK4|A0A4Z0GJK4_9BACL Isochorismate synthase O S=Sporolactobacillus shoreae OX=1465501 GN=E4665_16675 PE=4 SV=1
MTMDTRIDEYGVPDRLIHKNETANRKILVSLVKKINWIDPVAFYQAGNEDFVGKRFYWQGQSGDFKMAGLGITEKIKIEGAADRIQKVRDSWSKILKNMVRTGVTDQEGSGPILFGGFSFDPNGRTTGLWKNFDSGLFYLPTFLLTVSRGQAYLTVNAFHFSGESLETSVSKMEEKADEILTKCQLVDYSTPKTEWLNIKKQDSEKWIELVNWAVKDLKAGVIDKVVLARTLELISDHRPDIGGVLHRLQAHQKGNFIFSLEVENDCFIGATPERLVRKQNNRLFSACLAGSIGRGRDPQEDDKLGRELMHDRKNRLEHNYVVSTVKNELKMVCEHLNIPDQPILMKNKHIQHLYTPVEGTCAAGVSIFDIVAGLHPTPALGGLPRNVAIKWIRENEPFERGLYASPIGWSDSNGNGEFAVGIRSALVSGKTTTLFAGCGVVRESIPEKEYEETAIKFRPMLDGLEVADNGSR

SEQ ID NO: 94916 - protein, 467 aa, Sporolactobacillus sp.
  misc_feature (1)..(467): tr|A0A4Q4IHB6|A0A4Q4IHB6_9BACL Isochorismate synthase O S=Sporolactobacillus sp. THM19-2 OX=2511171 GN=EWH91_08 040 PE=4 SV=1
MVSQVVDHAQVIRQPGNDDSRLVSLTRKIQSADPIAFYQSGEGMFQGKRFYWENPSGQLIMAGLGFVENIHITGEAQRFQRIRDNWSDIVSGVNRIGVTGIEATGPVLFGGFSFESEDNGMNLWQAFGNGCFYLPEFLLTVVEGCSYLTLNVCCPKSGSPDAVLTEKERLVADLLRKKASHSPSSGPFYPDHIEKQDMAAWSFMVNKALQNIMTGSIDKVVLARTVQLHYDQKPKSERVLNRLRKEQCGNYIFCQESGQDYFIGATPERLIRKEGDKLYSTCLAGSAARGKNAEEDRELGRKLLHDQKNRKEHQYVVSMIREVFQNLCSSVAIPEKPILLKNRDVQHLYTPACGRCRRDVSLFDLVSRLHPTPALGGLPRTAAVQWIRENETERRGLYGSPIGWCDAEGNGEFAVGIRSGLVKPKKAILYAGCGIVKDSVPETEYRETQMKFRPMMSGLGVSSFGTC

SEQ ID NO: 94917 - protein, 993 aa, Sporomusa sp.
  misc_feature (1)..(993): tr|A0A0U1L2H4|A0A0U1L2H4_9FIRM 2,3-dihydroxybenzoate-AM P ligase of siderophore biosynthesis / Isochorismate sy nthase of siderophore biosynthesis OS=Sporomusa sp. An4 OX=411922 GN=SpAn4DRAFT_0343 PE=4 SV=1
MKADKEWFDNAAIKYEQLGYWEKLTLGQQLKLWAEKYQNRIALVEDDTRLTYKELDHKVDELAAGFFTMGIKKGDNVVVQLPNRISFVITCFALFRIGAVPVLSLPAHRETELDGIFTLAKPVAYIIPVTFLGFDYKKMADQLVKKHPAVKFIITDGKSENSINLADISMPPVDLEGPSYRDTALLLLSGGTTDTPKLIPRTHTDYAYNAKATAERCKLNLQSAYLAVLPIAHNFPLCCPGVLGTLSVGGKVVLCKTTSSDEAFPLIEKERVTITALVPAMVNLLLEVLEWDNSNDISSLEVLQVGGSMLDENLAKRIMPEMQCRLQQVFGMAEGLICCTAIDDPDHIIHSCQGWPISEGDEIRIVDEDGNDVVQGQYGELLVRGPYTIRGYYRAPEQNRKDFTSDGFYRSGDKARITPEGNIQIGGRIKEQINRAGEKIMPAEIESYLCSHPAIRNAALIGLPDDNLGERSCAYLITDNREINLTDIHKFLHDLGVARYKMPDQIELIDCWPLTSVGKVDKTKLKAMAAGPDRKAEDYPTSYFEEAIDFAGDAHLTAAQIIESGICETYLLYENKEELSLGMGVHTLVSVDSEYTTLKTDNESLQLENELLSETIARAFSAVRLKNWRAYGTANFGLARYHHKLPLLSEDNCLLKLFIPEVEVRFTPNSILLRALDNERFKELGKLVRAILQMGHNRSSVKSLAARVDGRKLEVPWVNTHNADGYMKIVAEAVQEIRGRKYQKVILSRKIPLDQELDMVASYITGRKVNSPARSFLLCFGGLHAAGFSPETVVEVDSQGWVSTQPLAGTRARGGSEEEESRLKDELLNDPKEIAEHAVSVKLAFEEMQSICDSESIAVSDFMSIANRGTVQHIASRLKGKLKPDCNSWHAFNALFPAITASGIPKKESIDAIGRLEAHPRNLYSGCVMTFDSDGVMDAALVLRTIFQKDKSAWLHTGAGIVEMSIPSRELEETREKLSSYSRQLVVSSRAIG

SEQ ID NO: 94918 - protein, 383 aa, Sporomusa termitida
  misc_feature (1)..(383): tr|A0A517DRC3|A0A517DRC3_9FIRM Isochorismate synthase M enF OS=Sporomusa termitida OX=2377 GN=menF PE=4 SV=1
MQYKAKQIKLDNPLSFWKHFVNEERMLFYNPLKKECILGAKRLKILPRQNGYTDYPYIFSAMTFFGTVKDEKWAGFGNESIAFQYYLVEKDGRQTLHYHGDPIKIENQEMKKYRHAYHYQEDDYEDWSQLFTSLTAAIAAKEVNKVVISREVRIECDRVIHIESVLQNLLQKNQNSNSFIFAYFKDGKTFLGATPEILVQKEQDNILSYALAGTISRDSQNDEVQKAILLRDAKNRYEHQIVIDTIAAGIKKFTGAVQVGDTSVLTLRNVHHLQTPIYAKDQRGTLLEWAARLHPTPALGGNPVHRALALLRRYEKHERGLYAAPLGITDAKGDGVFVAGIRSALIQGNLAFAYTGCGLVAKSESRAEYLETNDKLRTIVESL

SEQ ID NO: 94919 - protein, 468 aa, Sporosarcina globispora
  misc_feature (1)..(468): tr|A0A0M0GA48|A0A0M0GA48_SPOGL Isochorismate synthase M enF OS=Sporosarcina globispora OX=1459 GN=menF PE=3 SV= 1
MVTIQDTELKEGIQEAIERAKALSKPVLVSEVQKINHIDPLSFYAAGKSRFFGERFFWKDPSSEAYIIGLGICKQIQSDQSTGRFNRVEKEWKRFINNSIIFNPYDKNATGPVMFGGFSFDPLKQKTKLWSKYSDSLFHVPTYMYSEMNGQAYLTTNVVCTQHDGESLFEKIVAERGMLIASIKGYHPESSNPLREEADINPEKWMNTVDSVVDELKSGPLKKVVLARESRLKYEKPIEIERVLSNLMELQRESFIFAFESNGDCFIGASPERLIKKYGENVFTTCLAGSIPRGKTEEDDHILGEALLHDQKNLTEHQYVVDMIKEAMEESCSEVELPDKPQLMKMRDIQHLYTPVIGKTKGEASLLALVDRLHPTPALGGLPKRAAVEKIREVEELDRGFYAAPLGWMDFRGNGEYAVAIRSGLIQGNEASLFAGCGVVQDSNAESEYQETKIKFRPMLTALGGYEK

SEQ ID NO: 94920 - protein, 458 aa, Sporosarcina newyorkensis
  misc_feature (1)..(458): tr|F9DWW8|F9DWW8_9BACL Menaquinone-specific isochorisma te synthase OS=Sporosarcina newyorkensis 2681 OX=102729 2 GN=menF PE=4 SV=1
MNRKLTDRANLGQTVGTEARFFTETIEVETLDPLAFFEAGRLHYGDHRFFWQNADKTVKLVGVGQAAVLTADTHRFQSISRQWKALCERLIKEEKDMDPVLFGGFSFDPQTRQDEEWTAFPAAYFTVPLIQLKIDNGKTYVSINYVTDELEAAAQFEGLRQERDRLIHIAQVDEFTLQGKPAIVSQTELATDRYMEAVENVTSQIKAQLAEKVVIARKIKLSFEEEFQKATALHAITNEQQASYHFGLQIGEEMFFGATPERLVEISKGQAYSACVAGSIHRGKTALEDQQLGEQLLRDKKNREEHQYVVDMITEVFSEFCSSLHVNKTPKLLKVRDIQHLFTPVEGKLAEDQDIFRLVEALHPTPALGGVPRKKALAIIRDEEQMDRGFYAGPIGWTDAAGNGEFAVAIRSGLLSGKDAYLYAGGGIVADSMPTEEYKETWVKFRPVLRALGGSLHE

SEQ ID NO: 94921 - protein, 462 aa, Sporosarcina pasteurii
  misc_feature (1)..(462): tr|A0A380CAD6|A0A380CAD6_SPOPA Isochorismate synthase d hbC OS=Sporosarcina pasteurii OX=1474 GN=dhbC PE=4 SV=1
MSQKITIPWLEQPVTEETHLRFFTETIEVGRISPLAFLEAGQTRYSEEHFYWQNANQTLTIVGLGHAEVLQSNCVEERFSDIKKRWREICDGLIKEEKDKAPVLFGGFSFDPKNARESEWAKFPSAYFVLPSFQLMTKNGRTYILINLVTTNYHAAEEFEKLRVERDQLIHKAQLNGFVPASKPTVESVDEIEKERYKQAVQNVTSQIQKGEADKVVVARSVKLNFKEPVSSVTALHHIANEQQESYHFGLQKGEQLFFGATPERLIEIEDGQAYSACVAGSIKRGETAEEDRLLGEELLTDRKNRDEHQYVVDMISTVFNEFCTNNSIPQEPKLMKIRDIQHLFTPVQASVDKEKSIFEFVQALHPTPALGGVPTNKSMDIIREEEQMDRGYYAAPIGWTDTEGNGEFAVAIRSALLEEEQAYLYAGGGIVANSEVEKEYDETWIKFRPVLRALGGKLYDK

SEQ ID NO: 94922 - protein, 404 aa, Sporosarcina sp.
  misc_feature (1)..(404): tr|A0A2G5ZIY3|A0A2G5ZIY3_9BACL Isochorismate synthase O S=Sporosarcina sp. P29 OX=2048252 GN=CSV68_00255 PE=4 S V=1
MSKVSMSKVKSILDEYESGDFFLSSSKQTIMGKGVFSVVKETWKTKNQICSLPDRVEEAIEQAKRAGHPHPIVVGAVPFDYSEASKMIIPEEVKVSTALVKDSVQLENIPLQPYEIQHIPEPAEYMKCVNQGLDKISSGQIDKIVVSRALNFKTKEQIDVKQILKRLEHHNKQGYTFAVDISDVNTISNKETVSTNGKRILIGASPELLVSKNDSILFANPLAGSRPRCDDPIEDQRRALELLESEKDLYEHAVVVNMVKESLAPFCESMDVPEIPSLIKTEAMWHLSTEIYGTLKQAQTSSLELGMALHPTPAVCGHPTELAREAIYEIEPFNRGFFAGMVGWCDENGNGEWIVTIRCAEVEENDIRLFAGAGVVAGSIPEEELNETGAKFKTMLDAMGIEKL

SEQ ID NO: 94923 - protein, 480 aa, Stanieria cyanosphaera
  misc_feature (1)..(480): tr|K9XV14|K9XV14_STAC7 Isochorismate synthase OS=Stanie ria cyanosphaera (strain ATCC 29371 / PCC 7437) OX=1117 80 GN=Sta7437_2363 PE=4 SV=1
MTQSRISMPVVSELDLIFQDHLKLDNFWDQQQLVSEPNEPKKIISFVQRIPTIDPLAFLQNFNHSNSLHFYWENPRKQEAVIACGVTQKLLIDSRDRFKIAQNFIQKCLKKTVRKGETSITGAGPHLFCTFTFFPDADKSYSPFPAATVFLPRLQLIKKNKSCLLIVNVPVNYADNSKLIVEEIKQKINSIDWSLQQKLNSEINECFASNYNSISEDSEYFKSVVTSALNSIAIDEFSKIVLAYATDVVSPVPFRLIKSLDNLRQRHPDCYIFSTSNGRDNNFIGASPERLVSIQNKQLVTDALAGSAPRGKTTAEDVQLANLLLKNRKEKREHQAVSDFLIERLRQLDLKPQQLPLQLLQLSNIQHLWTPIYAHLSHDLDPLEIVAQLHPTPAVAGVSTEIACEQIRRYEKFDRSLYAAPLGWVDYQGNSEFIVGIRSALIEGNRARLYAGAGIVSGSNPEKEFAEIQLKLQSLLKALV

SEQ ID NO: 94924 - protein, 403 aa, Staphylococcus argenteus
  misc_feature (1)..(403): tr|A0A5B8LCI6|A0A5B8LCI6_9STAP Isochorismate synthase O S=Staphylococcus argenteus OX=985002 GN=FPV14_05890 PE= 4 SV=1
MRLNDNQTSYFGYKAIQLFKNNFKNKQSIFREWEKLKHEMAFIHPQSGRHHLRIVGGFQFSSHKSDDEWREFGLNHFVLPEVLITTEDEDTFLTYTVQRENFDMDSFKALVEFFNNAIEIDVEDQNGEIIRNEDIYKDDWRQLVEEAIESINKEEKIVLARRRLIKFDKDISIPYILKQAFSKEKNSYIFLLESQDSIFFSQTPEQLLKVNNRILSTKAVAGTIKRSHNEEEDKKHVEAFLKDNKNLVEHRFVVESILHDIEPYITELDYDKTPKILKNDHLYHLYTEIKAPLKDDSYIGLIDNLHPTPALGGYPKAFAIDFIEQKEFGTRGLYGAPVGYIDIYDDCEFIVAIRSMLIKKTQATLFAGCGIVKDSDPDSELAETNLKFSPMMNALGVDMNGKS

SEQ ID NO: 94925 - protein, 450 aa, Staphylococcus arlettae
  misc_feature (1)..(450): tr|A0A380CIY5|A0A380CIY5_9STAP Menaquinone-specific iso chorismate synthase OS=Staphylococcus arlettae OX=29378 GN=dhbC PE=4 SV=1
MTVDVKEDKIVSAVYDSSRTWVSVEAKIDYELDPTMLFQITEDSADDRFFFKKNDNTMSFFGYRAINRFKNDFENKQSIFREWEKYKNDIELIHPNSDKHHLKICGGFQFSSHKSGDEWRQFGINHFILPEVLVTMTEGSTYITYTTKRATFELAKFNAVIQHLTQNTTVIHDDLGKVKRIEDIYKEEWRDLVRDTIAQLNENNKIVLARKRMIQFEKQIKIPFILNQAMQSERNSYLFVLESEDSIFFSQTPEQLMEVKNDVIYTKAVAGTIKRTHDEAEDLRNIEQFLQDTKNLNEHQFVVDSILNDIKPYVNEVNYNESPKILTNDHLYHLLTEINGTLTNESYIGLIDHLHPTPALGGFPKDEAVSYIEKNEFGTRGLYGAPVGFIDMYDDCEFIVAIRSMLIKNQQATLFAGCGIVHDSDPDSEVEETAVKFTPMMRALGVDGND

SEQ ID NO: 94926 - protein, 403 aa, Staphylococcus aureus
  misc_feature (1)..(403): tr|A0A4P7P4N6|A0A4P7P4N6_STAAU Isochorismate synthase O S=Staphylococcus aureus subsp. aureus OX=46170 GN=E5491 _05045 PE=4 SV=1
MRLNDNRTSYFGYKAIQLFKNNSKNKQSIFKDWEKLKHNITFIHPQSEKHHLRVVGGFQFSSHKSDDEWREFGLNHFVLPEVLISTDNNGTFLTYTVKRESFTVEALNDLMDLFNNISDIDVDEQIGEITRNEDIYKDDWRQLVVEAIESINNEEKIVLARRRLIKFDKDISIPYILKQAYSKEKNSYIFLLESQDSIFFSQTPEQLIKVNNKILSTKAVAGTIKRSQDEDEDTKNVEAFLKDNKNLIEHRFVVDSILHDIKPYITELHYDKTPKILKNDHLYHLYTEIKAPLKDDSYISLIDHLHPTPALGGYPKEFAMDFIEQKEFGTRGLYGAPVGYIDIYDDCEFIVAIRSMLIKKAQATLFAGCGIVKDSDPDSELAETNLKFTPMMNALGVDMNGKS

SEQ ID NO: 94927 - protein, 252 aa, Staphylococcus auricularis
  misc_feature (1)..(252): tr|A0A2X5AUX2|A0A2X5AUX2_9STAP Isochorismate synthase O S=Staphylococcus auricularis OX=29379 GN=entC PE=4 SV=1
MKVKKIVLARRRLYLFEKPIYIPIILQRALQNEFNSYIFILESGDSIFFSQTPEQLMEVNDNVLSTKAVAGTIKRTHDEAKDQANVNAFLEDEKNLNEHRFVVKSILNDIEDYVEDVDYNDSPDILKNDSMYHLYTEIKALLKDGSYIGLLDHLHPTPALGGYPKDEAVDYIEQNEFGTRGLYGSPVGFIDIYNNCEFIVAIRSMLIKGNQATLFAGCGIVSDSVADSEVAETAVKFTPMMRALGVEDHDNN

SEQ ID NO: 94928 - protein, 456 aa, Staphylococcus capitis
  misc_feature (1)..(456): tr|A0A4U9TJ54|A0A4U9TJ54_STACP Isochorismate synthase O S=Staphylococcus capitis OX=29388 GN=dhbC PE=4 SV=1
MKRMAVNVKEEDIVDKLYASTKDWVSVETELNRTIDPSTLFHLTEQDAGDRFYMRLNDNHSSYFGYHEVQRFKNNFENKQSIFREWEKLKNEIELIHPNTSQHHLRLCGGFQFSSHKSDDEWREYGLNHFVLPKVLISIEGDRTFITYTTERQDFNIETFKEVVSYFENTEVNETEDSLGDVTRVEDIYKDDWRELVEEAIDTIDETKKIVLARRRLIKFDKDINIPYVLNQALKNEKNSYMFLLESNQSIFFSQTPEQLIKVQDGVLSTKAVAGTIKRSHNEVEDEANIKAFLKDKKNLGEHQFVVESILNDIKPFVQDVEYNETPNILKNDHLYHLYTEIKGHLNDKSYIGLIDCLHPTPALGGYPKDEALEFIENKEFGTRGLYGSPVGYIDVYDDCEFIVAIRSMLIKGDQATLFAGCGIVKNSDPDSEVAETAVKFSPMMNALGVDNYDKS

SEQ ID NO: 94929 - protein, 453 aa, Staphylococcus caprae
  misc_feature (1)..(453): tr|C5QR49|C5QR49_9STAP Isochorismate synthase OS=Staphy lococcus caprae M23864:W1 OX=525378 GN=menF PE=4 SV=1
MAVNVKEEDIVDKLYASTKDWVSVEVEIDRTIEPSALFRLTEQEAGDRFYMRLNDNYSSYFGYHAVQRFKNNFENKQSIFREWEKLKYEIELIHPDTSRHHLRLCGGFQFSSHKSDDEWREYGLNHFVLPKVLISNEGERTFITYTTERQDFDIEAFKQLVSYFEHTKVDSSETERGNVTRMEDIYKDDWRELVEESIEKIDESKKIVLARRRLIKFDKEIDIPYVLNRALQNEKNSYIFLLESNQSIFFSQTPEQLIKVEDGILSTKAVAGTIKRSHNEAEDEENIKAFLKDKKNLGEHQFVVESILNDIKPFVQDIDYNETPNILKNDHLYHLYTEIKGHLNDKSYIGLIDCLHPTPALGGYPKAEALEFIENNEFGTRGLYGSPVGYIDVYDDCEFIVAIRSMLIKGDQATLFAGCGIVKNSDPDSEVAETAVKFSPMMNALGVDNYDES

SEQ ID NO: 94930 - protein, 455 aa, Staphylococcus carnosus
  misc_feature (1)..(455): tr|A0A3S0MPI1|A0A3S0MPI1_STACA Isochorismate synthase O S=Staphylococcus carnosus subsp. carnosus OX=147448 GN= CD154_04705 PE=4 SV=1
MAANLKEDEIIESIYESNKNWISVEVILNRTLPPTALFQLTEDQAGDRFYLRLNDNQSSFFGYHAVQRFKNNFENKQSIFREWEKFKKDVELIHLETSKHHLKVVGGFQFSSHKSDDEWREFGINHFVVPKVLITNVDNQTLLTYTVERENFDIDQFKEIIDYFENAEIHEPDVNDAMGNITRMEDIYKDEWKELVSDAIAQLDEDKKIVLARRRLIKFDKTISVPYVLKRALENEKNSYIFILESNQSVFFSQTPEQLLKVDEGVLSTKAVAGTIKRTHNENVDQQNVKAFLEDKKNLGEHQFVVRSILHDIESFVDDVEYNQTPNILKNDHMYHLYTEIKGKLKSNSYIGLIDELHPTPALGGYPKDEAVKFIEENEFGTRGLYGAPVGFIDMDDDCEFIVAIRSMLIKEKQTTLFAGCGIVKDSDPESELAETAVKFSPMMNALGVVDKNES

SEQ ID NO: 94931 - protein, 450 aa, Staphylococcus chromogenes
  misc_feature (1)..(450): tr|A0A4U0DGP8|A0A4U0DGP8_STACR Isochorismate synthase O S=Staphylococcus chromogenes OX=46126 GN=FCF12_06130 PE =4 SV=1
MTVDVGEQEIIDAIAHTSKTWVSIEVRLSRTLDPVTLFKKTNQEAGNRFYFRLNDNETAYFGCRVAKEFKNNKQNKRSIFEEWNQFKNDIALIHPQSERHHLRICGGFQFSTKRTSVEWHQFGMNHFILPEILVSHVKGETYLTYTVPVEQFHYETFKEWETFFNTLNDDNASVTPEEQQVCRQMDLDVEEWEQLVANTIRQLDTDEKVVLSRRRAIEFNTSIDIALVLEKALKNEKNSYLFVLESGEDCFISQTPEQLFKVQEGMLSTKAVAGTIKRTPNPQQDKTRVHAFLQDDKNLGEHHIVVESILEDIKPFVKNVNYNKTPSILKNDHLYHLYTEISGTLATSNYIELIDVMHPTPALGGYPKAQAMTYIDAHEFNARGLYGAPVGMIDMYDDSEFIVAIRSMLIQGNQALLFAGAGIVKDSDAKAEVAETALKFSPMMDALGVN

SEQ ID NO: 94932 - protein, 450 aa, Staphylococcus cohnii
  misc_feature (1)..(450): tr|A0A3N0HTC1|A0A3N0HTC1_9STAP Isochorismate synthase O S=Staphylococcus cohnii OX=29382 GN=EFY80_03875 PE=4 SV =1
MTLDVKESEIVEAVYESNHTWVSVEAKLDYELEPSLLFHLTEDCAGDRFYFKKNDNETSFFGYHAITRFKNDFENKQSIFREWEKYKNDIELIHPNSERHHLKICGGFQFSTHKSGDEWREFGINHFVLPEVLVTMEQGQSFITYTVEADKFEIDTFLAIIDRLTQKDVQPSDEIGDIKRIDDIYKDEWRELVKDTIDILDENKKIVLARKRLIMFDKNINIPYILNRAMQGEHNSYLFVLESQDSVFFSQTPEQLMEVKDDVLSTKAVAGTIKRTHRDDIDKANIDAFLNDDKNLNEHHFVVKSILNDIKPYVEEITFNKKPQILTNDHLYHLYTKIEGRLLQNSYIGLLDNLHPTPALGGYPKEEAISYIENNEFGTRGLYGAPVGYIDMYDNCEFIVAIRSMLIKKNQATLFAGCGIVQNSDADSEVEETAVKFNPMMKALGVEKYE

SEQ ID NO: 94933 - protein, 450 aa, Staphylococcus condimenti
  misc_feature (1)..(450): tr|A0A143PA84|A0A143PA84_9STAP Isochorismate synthase O S=Staphylococcus condimenti OX=70255 GN=menF PE=4 SV=1
MTVSVKDDQILDAIYENSESWVSVEIKIDQPTNPIMLFQMTEGQAQDRFYFKDNSGKTAFFGYDALLKLKNNHENKQSIFREWEKYKENIALIHPDTPKHHLKVCGGFQFSSHKSDDEWRQFGLNHFVLPKVLITMEKNETILTYTVPRETFDIEDLKALANKIASTEVQPTHANGDIKRSEDIYKDEWLNIVREAIDTMNEDEKIVLARRRMIQFKKDIDIAYVLENALKNESNSYIFVMESDQSIFFSQTPEQLMEVENNVLSTKAVAGTIKRTNDEAEDKKHLNAFLQDEKNLHEHRFVVQSILDDIEPYVGDVEYNKHPKILKNDHLYHLYTEISGELKDKTYIGLLDRLHPTPALGGFPKEKAVDFIEQKEFGTRGLYGSPVGYIDMDDNCQFIVAIRSMLIKKNQATLFAGCGIIKQSEPESELAETTLKFTPMMNALGVENHG

SEQ ID NO: 94934 - protein, 452 aa, Staphylococcus delphini
  misc_feature (1)..(452): tr|A0A447YZU8|A0A447YZU8_9STAP Isochorismate synthase O S=Staphylococcus delphini OX=53344 GN=menF PE=4 SV=1
MSVDVCEQAIIDAVQQTKQQWVSVEVKLEQQLDPITLFDMSKEDAGDRFYFRLNDNETSFFGYRVAAKIKNDFTNKRSIFKEWEKFKDDIALIHPDSERHHLRICGGFQFSTKRMGDEWRRFGVNHFILPEVLISQVNQETFLTYTVQKEAFSIEQLYELVEKLNHLPRVVVQNTTPPQIKRIEDIYKDEWEALVEETTAKLAHDEKVVLSRRRMVQFDADIEIGAVLYRALKNEKNSYLFALESEDDIFISQTPEQLFKVTNGMLSTKAVAGTIPRTHNEAQDQARINALLKNEKNLIEHGIVVESILEDIRPFIQYADYNREPQVLKNDHLYHLYTEIGGPLAHKSYIELIDDLHPTPALGGYPKARALEYIEMHEFGARGLYGAPVGMIDMYDDCEFIVAIRSMLMNHQQALLFAGAGIVKDSDAAEEVAETELKYKPMMVALGVSEHD

SEQ ID NO: 94935 - protein, 455 aa, Staphylococcus devriesei
  misc_feature (1)..(455): tr|A0A2K4DLK6|A0A2K4DLK6_9STAP Isochorismate synthase O S=Staphylococcus devriesei OX=586733 GN=entC PE=4 SV=1
MAANLKEGEIIESIYESNKSWVSVEVVLDKTLTPDALFHLTEDQAGDRFYFRLNDNTSSFFGYHAVQKFKNNFENKQSIFREWEKFKNEVELIHLETKKHHLKVIGGFQFSSHKSDDEWREFGINHFVVPEVLISSIDNQTLLTYTVERANFDMEHFKDVIAHFENADVDDSDHEETLGNITRMEDIYKDEWKELVGNAIEQLDENKKIVLARRRMIKFDKPIDIPYVLNRALQNEKNSYLFILESNESVFFSQTPEQLLKVEDGVLSTKAVAGTIQRSHNEEEDRKNIEAFLQDKKNLGEHDFVVRSILHDIEPYVEGVDYNQTPNILKNDHMYHLYTKIQGKLKSNSYIGLIDQMHPTPALGGYPKEEAVKFIEEHEFGTRGLYGAPVGYIDMNDDCEFIVAIRSMLIKQNQTTLFAGCGIVKDSDPESEVVETAVKFSPMMNALGVVDKNES

SEQ ID NO: 94936 - protein, 456 aa, Staphylococcus epidermidis
  misc_feature (1)..(456): tr|D4FK37|D4FK37_STAEP Isochorismate synthase OS=Staphy lococcus epidermidis M23864:W2(grey) OX=525375 GN=HMPRE F0794_0925 PE=4 SV=1
MKKMDVNVDEQAIVDKLYESTKDWVSVEVELNKTMKPSVLFHLTEKDAGDRFYMRLNDNYSSYFGYHAIHRFKNDFENKQSIFKDWEKLKNNIELIHPHNKYHHLRLCGGFQFSSHKSDDEWREYGLNHFVLPKVLISNEGTRTYLTYTTKRQDFDLQAFKTLVAHFEQTTMDNPEEALGDVTRMEDIYKDDWRDLVKEAIDTIDDNKKIVLARRRLVKFDKKINIPYVLNRALENEKNSYIFLLEANQSIFFSQTPEQLIKVEDGVLSTKAVAGTIKRTHNEQIDNKNIEAFLKDKKNLGEHRFVVESILNDIEPFVQDVEYNETPNILKNDHMYHLYTEIKANLNDKSYIGLIDRLHPTPALGGYPKEEALDFIENKEFGTRGLYGAPVGYIDVYDDCEFIVAIRSMLIKEQQATLYAGCGIVKNSDPDSEVAETAVKFSPMMNALGVDNNDES

SEQ ID NO: 94937 - protein, 451 aa, Staphylococcus equorum
  misc_feature (1)..(451): tr|A0A431ZUS8|A0A431ZUS8_9STAP Isochorismate synthase O S=Staphylococcus equorum subsp. equorum OX=29383 GN=CD1 45_11495 PE=4 SV=1
MDVNVKEDDIVDKIYESTKDWVSVEIKVDKSFEPSTLFHLTEQNAGDRFYMRLNDNYSSYFGYHAVQRFKNDFENKQSIFKDWEKLKDNIELIHPDSDYHHLRLCGGFQFSGHKSDDEWREYGLNHFILPKVLISSEGARTFITYTTERQDFDIEVFKDLITYLEHTGVDTSRDSLGEVTRMEDIYKDDWRDLVNEAIDTIDESKKIVLARRRLIKFDKEINIPFILNQALNNEKNSYIFLLESNQSVFFSQTPEQLIKVEDGVLSTKAVAGTIKRTHNEKVDEENIKAFLKDKKNLGEHRFVVESILSDIKPFVQDVEYNETPNILKNDHLYHLYTEIKANLNDESYIGLIDCLHPTPALGGYPKAEALEFIENKEFGTRGLYGSPVGFIDVYDDCEFIVAIRSMLIKDCQATLFAGCGIVKNSDPDSEVAETAVKFSPMMNALGVDNND

SEQ ID NO: 94938 - protein, 452 aa, Staphylococcus fleurettii
  misc_feature (1)..(452): tr|A0A431YZW4|A0A431YZW4_9STAP Isochorismate synthase O S=Staphylococcus fleurettii OX=150056 GN=CD142_10590 PE =4 SV=1
MTVDVCEQAIMDAVKQTTQQWVSIEVKLQKQLDPITLFEMSKEDAGDRFYFQLNDSKTTFFGYRVATKIKNDFTNKRSIFKEWEKFKDNIALIHPDSERHHLRICGGFQFSTKRLGDEWRRFGVNHFILPEVLISQVNDETFLTYTVQKETFSIDQFNALFDQLNHLETIEIKDTTPPPVKRMEDIYKDEWEALVAKTTEQLAHDEKIVLSRRRMVQFDADLSIPTILYRALQNEKNSYLFVLESEEDVFISQTPEQLFKVTNGELSTKAVAGTIRRTHDEKVDQAHVEAFLKDEKNLVEHEIVVESILEDIRPFTTHVDYNKEPKILKNDHLYHLYTEIGGPLAQKSYIELIDDLHPTPALGGYPKARALDYIEAHEFGARGLYGAPVGMIDMYDDCEFIVAIRSMLMNRHQALLFAGAGIVQESNAAEEVAETALKFKPMMEALGVTEYD

SEQ ID NO: 94939 - protein, 450 aa, Staphylococcus gallinarum
  misc_feature (1)..(450): tr|A0A3A0W0U0|A0A3A0W0U0_STAGA Isochorismate synthase O S=Staphylococcus gallinarum OX=1293 GN=BUZ14_03440 PE=4 SV=1
MTLDVKESEIVEAVYESKHTWVSVEATLDYELNPTELFHITEDSAGDRFYFRKNDNETSFFGYHAIKRFKNDFENKQSIFREWEKYKNDIALIHPSSTKHHLKICGGFQFSSHKSGDEWREFGINHFILPEVLVTMEQGKSYITYTVESDKFEIETFLAIIEKLTQPNISPDFERGDIKRIEDIYKDEWRDLVKDTIDILDENKKIVLARKRMIQFDKNINIPYILKQAIQGEHNSYLFVLESQGSVFFSQTPEQLMEVNDDVLSTKAVAGTIKRTHEETVDKANIDAFLNDEKNLNEHRFVVESILHDIKPYVEHIEFNKEPQILTNDHLYHLYTKIKGQLIDESYIGLLDSLHPTPALGGFPKKEAIEYIEQNEFGTRGLYGAPVGYIDMYDNCEFIVAIRSMLIKKNQATLFAGCGIVFDSDADSEVEETAVKFNPMMKALGVDDYE

SEQ ID NO: 94940 - protein, 455 aa, Staphylococcus haemolyticus
  misc_feature (1)..(455): tr|A0A2S6DX95|A0A2S6DX95_STAHA Isochorismate synthase O S=Staphylococcus haemolyticus OX=1283 GN=CV015_07605 PE =4 SV=1
MAANIKEDDIIESIYESNKSWVSVEVKIDRELAPDELFNLTESQAGDRFYFRLNDNASSFFGYHAVQRFKNNFDNKQSIFREWEKFKKDIELVHPDIEKHHLKVIGGFQFSSHKSDDEWREFGINHFVIPQVLISNIGQTTYLTYTVERAQFDIEQFKEVVNYFEETQIAKAEHDETLGNILRMEDIYVDEWKELVRDAIAQLDETKKIVLARRRMIKFDKPISIPYVLNRALQSERNSYLFILESNQSVFFSQTPEQLLKVEDGVLSTKAVAGTIKRSNDIDEDEKNIQAFLKDKKNLDEHDFVVKSILDDIKPYVDNIEYNHSPNILKNDHLYHLYTQIQGQLKNNSFIGLIDEMHPTPALGGYPKNEALKFIEENEFGTRGLYGAPVGYIDMNDDCEFIVAIRSMLIKQNQTTLFAGCGIVKDSDPDSELAETAVKFSPMMNALGVVDKNES

SEQ ID NO: 94941 - protein, 455 aa, Staphylococcus hominis
  misc_feature (1)..(455): tr|A0A4Q9WQC9|A0A4Q9WQC9_STAHO Isochorismate synthase O S=Staphylococcus hominis OX=1290 GN=EQ804_07260 PE=4 SV =1
MAANLMEDKIMESIYESNKNWVSVEVVLNKSLTPSELFNLTEKQAGDRFYLRLNDNMSSFFGYHAIQRFKNNFENKQSIFREWEKFKNDVELIHVNTQKHHLKIVGGFQFSNHKSDDEWREFGINHFVVPEVLISSVNNQTILTYTVEKAQFEMEKLNQIINYFENTQVDTTERETALGNVTRMEDIYVDEWKDLVSHTIEQLDKDQKVVLARRRLIKFDKPISIPYVLNRALNNEKNSYLFILESNQSVFFSQTPEQLLKVEDGVLSTKAVAGTIPRTQDAEKDEKNVQEFLQDSKNLGEHQFVVRSILNDIEPYVENVEYNQKPNILKNDHMYHLYTEIKGTLLNHSYISLIDELHPTPALGGYPKKEAVDYIEKNEFGTRGLYGSPVGYIDVDDDCEFIVAIRSMLIKQNQTTLFAGCGIVKDSNAESEVEETSVKFSPMMNALGVVNENES

SEQ ID NO: 94942 - protein, 450 aa, Staphylococcus hyicus
  misc_feature (1)..(450): tr|A0A418JIU1|A0A418JIU1_STAHY Isochorismate synthase O S=Staphylococcus hyicus OX=1284 GN=BUZ57_06800 PE=4 SV= 1
MTVDVGEQEIIDAIANTSKTWISIEVRLPHTLDPVTLFRKTNQEAGNRFYFRLNDNETAFFGCRVAKEFKNNNKSKRSIFKEWNRFKEDIALIHPSTPKHHLRIYGGFQFSTERTSSEWQQFDMNHFILPEILISHIEGATYLTYTIRKTDFSFQEFKDIYTYLSHIDRTSHILEEHEMHVCAQQDLDIDAWERLVDKTIQQLKSDEKIVLSRRREIKFNTTIDIATVLNRALKNEKNSYLFLIESGNDCFISQTPEQLFKVQNNMLSTKAVAGTIKRTLNTEQDQAQVEAFLQDAKNLVEHHIVVESILEDIKPFVNDVHYHATPNILKNDHLYHLYTEISGPLATPNYIELIDVMHPTPALGGYPKAQAVQYIDAHEFNARGLYGAPVGMIDMYDDSEFIVAIRSMLINDNTALLFAGAGIVKESNAKAEVAETALKFSPMMDALGVN

SEQ ID NO: 94943 - protein, 452 aa, Staphylococcus intermedius
  misc_feature (1)..(452): tr|A0A380G7V2|A0A380G7V2_STAIN Isochorismate synthase O S=Staphylococcus intermedius NCTC 11048 OX=1141106 GN=m enF PE=4 SV=1
MSVDVCEQAIIDAVQQTKQQWVSVEVKLERQLDPITLFDMSKEDAGDRFYFRLNDNETSFFGYRVAAKIKNDFTNKRSIFKEWEKIKDDIALIHPDSERHHLRICGGFQFSTKRMGDEWRRFGVNHFILPEVLISQVNQETFLTYTVKKEAFSIERFYELVEMLNHVPRVVVQNTASPQIKRIEDIYKDEWQALVETTTAKLAHDEKVVLSRRRMVQFDADIEIGAVLYRALKNEKNSYLFVLESEDDIFISQTPEQLFKVTNGMLSTKAVAGTIPRTHNEAQDQARIDALLKNEKNLIEHGIVVESILEDIRPFIQYADYNHEPKVLKNDHLYHLYTEIGGPLAYQSYIELIDDLHPTPALGGYPKARALEYIEAHEFGARGLYGAPVGMVDMYDDCEFIVAIRSMLMNHQQALLFAGAGIVKDSDAAEEVAETALKFKPMMVALGVSEND

SEQ ID NO: 94944 - protein, 450 aa, Staphylococcus lentus
  misc_feature (1)..(450): tr|A0A4Y9KAI6|A0A4Y9KAI6_STALE Isochorismate synthase O S=Staphylococcus lentus OX=42858 GN=E4T78_10590 PE=4 SV =1
MALRTDLKQNMISEIKGNKNYISVEIELQYQPDLINLLRKANHYLGQRFYYKSKDHRLEMCGIGYVLEARYSHLEHDKIYEYWQSIKEQLEAKVYHDKKHHLKFFGGFQFSEHALTNEWKDYGMSHFVLPKYLITIEDERCYLTYTEQSQKFNIEEINDILSKLDESKRTDIIETPTMISNKDIQSEEWKALVDKVVQFMKDSVALQKVVLSRRRQIVFENEVNIEDALQRSLNINESSYLLLFESGKSQFISQTPEQLCQISNGILYTNAIAGTISRTDDETINESLKDELLNDSKNQFEHRYVVDSIIHDIQSFTKHLEYDKKPTILTNKHLYHLYTKIQADLLSENVLEIVNQLHPTPALGGFPKAEAMRFIENEEFGTRGLYGAPLGYIDLEDNGEFIVSIRSMLVNENSATLYSGCGIVKDSNAESEFEETDLKFKPMLKALGVM

SEQ ID NO: 94945 - protein, 453 aa, Staphylococcus lugdunensis
  misc_feature (1)..(453): tr|A0A4Q9WCV8|A0A4Q9WCV8_STALU Isochorismate synthase O S=Staphylococcus lugdunensis OX=28035 GN=EQ812_03405 PE =4 SV=1
MAANLLEDEINHVLYSSNKDWVSVETKLHRELNPSELLQLTEAQAGDRFYLRLNDNKSSFFGYHAIQKFQNNFDNKQNIFREWEKFKHDIELIYPETDKHHLRICGGFQFSSHKSDDEWREFSINHFIVPEVLISRDEEGTVLTYTTKRLSFDMSRFKEIIDYFEHADITLDDDEILNVTKMEDIYKDEWRDLVQETIDYIDAHKKIVLARRRLVKFANNINIAHVLERAMANERNSYIFLIESNESIFISQTPEQLFKVENHVLSTKAVAGTIKRTHEEAEDKANVEAFLNDRKNLDEHRFVVNSILNDIEPYVTQVDYNKTPNILKNDHLYHLYTQITGKLNDKPYSDLIDFMHPTPALGGYPKEEALRYIEQKEFGTRGLYGSPVGFIDVYNDCEFIVAIRSMLVKQNQATLFAGCGIVKESNPDSEVAETAVKFLPMMNALGVVNKNES

SEQ ID NO: 94946 - protein, 451 aa, Staphylococcus microti
  misc_feature (1)..(451): tr|A0A0D6XQ66|A0A0D6XQ66_9STAP Isochorismate synthase O S=Staphylococcus microti OX=569857 GN=menF PE=4 SV=1
MTVDAREQAINEAVKQADQRWVSIEVKLSRSLDPVTLFHVTNEAAGNRFYFRLNDNKTSYFGYRVATYIKNDNANKRALFEAWQSLKQDILCVHPDDKRHHLRLCGGFQFSMQRTGKEWETFGHNHFILPEVLISQVEGVTYLTYTVERDAFSMATLQEHISYFEMVAPVSDTIEMPQVDHIENIKQDAWQSLVAQTVARLARHEKIVLSRQRKVHFDSEIHIGAILQKALRHEKNSYLYVLESDTHTFISQTPEQLFKVTDGRLYTKAVAGTIHRTNDEAQDAERLTAFLQDKKNLGEHQIVVDSILEDIQPFVKNVTYDTTPKILKNDHLYHLYTEISGELDGATYIDVIDALHPTPALGGYPKAMAMAYIDEHEFAARGLYGAPVGMIDIYNDCEFIVAIRSMLVNGNEAMLYAGAGIVKDSDPASEVAETALKFSPMMDALGVTARD

SEQ ID NO: 94947 - protein, 451 aa, Staphylococcus muscae
  misc_feature (1)..(451): tr|A0A240C009|A0A240C009_9STAP Isochorismate synthase O S=Staphylococcus muscae OX=1294 GN=menF PE=4 SV=1
MTVDAREQAIKEAIKQATEQWVSVEVKLSHVIDPITLFDATKEAAGSRFYFRLNDNKTAFFGYRIATQIKNKQENKQAIFKQWQILRQNILFVNSESDRHHLRLCGGFQFSDHRTDDVWQAFDQHHFILPEVLISQVDGETFLTYTVERNAFSMDMFLHLIKQFEEITPLAETNDMPEVLHIENVQQQEWQNLVERTVEQLANDEKIVLSRQRKIKFSSQIHIDTILQNALRNEKNSYLFVIESGTDTFISQTPEQLFRVQDGMLSTKAVAGTLHRTQDSVEDDKRLQAFLQDEKNLGEHQIVVNSILEDLQPFVKKATYDAAPKILKNDHLYHLYTEIGGPLEGHSHMLLVDGLHPTPALGGYPKSMAMAYIDKYEYAARGLYGAPVGMIDAYDDCEFIVAIRSMLLKVDEAILYAGAGIVKASDPAAEVAETALKFSPMMDALGVTDIG

SEQ ID NO: 94948 - protein, 450 aa, Staphylococcus nepalensis; identical to SEQ ID NO: 93131
  misc_feature (1)..(450): tr|A0A2T4S812|A0A2T4S812_9STAP Isochorismate synthase O S=Staphylococcus nepalensis OX=214473 GN=entC PE=4 SV=1

SEQ ID NO: 94949 - protein, 450 aa, Staphylococcus pasteuri
  misc_feature (1)..(450): tr|A0A431ZFI7|A0A431ZFI7_9STAP Isochorismate synthase O S=Staphylococcus pasteuri OX=45972 GN=CD129_10565 PE=4 SV=1
MALRTDLKQKMISEIDGNKNYISVEIELQYQPDLIHLLREEINYIGQRFYYKSKDFKLEMCGIGYLLEARYSHLEHDEIYEYWQNIKEQLNTVIMHDDKHHLKFFGGFQFSEHSLTNEWKDYGMSHFVLPKFLITKENGRCYLTYTDDNNKFDIENIERILNAIDSKAQTGVLSEPSVVENKDIQSEEWKDLVTKVVSLMNESVALQKVVLSRRRKIEFQDDVNVEDALQRSLDSNESSYLLLFESGKSQFISQTPEQLCQIDNGKLYTNAIAGTIIRTEDESENNKLKAELLNDSKNQFEHRYVVDSIIHDIQSFTKQLEYDKKPTILTNKHLYHLYTKIQADLLSENVLEIVNQLHPTPALGGFPKVEAIKFIEHEEFGTRGFYGAPLGYIDLDNNGEFVVSIRSMLVRGNAATLYSGCGIVKDSNAITEFEETDLKFKPMLKALGVM

SEQ ID NO: 94950 - protein, 455 aa, Staphylococcus petrasii
  misc_feature (1)..(455): tr|A0A5F1B313|A0A5F1B313_9STAP Isochorismate synthase O S=Staphylococcus petrasii subsp. petrasii OX=1276937 GN =E2554_02075 PE=4 SV=1
MAANLKEDEIIESIYESNKNWISVEVILNRTLPPTALFQLTEDQAGDRFYLRLNDNQSSFFGYHAVQRFKNNFENKQSIFREWEKFKKDVELIHLETSKHHLKVVGGFQFSSHKSDDEWREYGINHFVVPKVLISNVDNQTLLTYTVERENFDMAQFKEIIDYFENAEVHEPDVNDAMGNITRMEDIYKDEWQELVSDAIAQLDEDKKIVLARRRLIKFDKTISIPYVLKRALENEKNSYIFILESNQSVFFSQTPEQLLKVDEGVLSTKAVAGTIKRTHNEDVDKQNVKAFLEDKKNLGEHRFVVRSILHDIEPFVDDVEYNQTPNILKNDHMYHLYTEIKGKLKSNSYIGLIDELHPTPALGGYPKDEALKFIEENEFGTRGLYGAPVGYIDMDDDCEFIVAIRSMLIKEKQTTLFAGCGIVKDSDPESELAETAVKFSPMMNALGVVDKNES

SEQ ID NO: 94951 - protein, 450 aa, Staphylococcus piscifermentans
  misc_feature (1)..(450): tr|A0A239U8Y4|A0A239U8Y4_9STAP Menaquinone-specific iso chorismate synthase OS=Staphylococcus piscifermentans O X=70258 GN=menF PE=4 SV=1
MTVSVKDDQILDAVYENSEKWVSVEIKIDQPTDPIMLFQMTEGQAKDRFYFRDNSGKTAFFGYNALLKLKNNHENKQSIFREWEKYKEEIALIHPDTSHHHLKVCGGFQFSTHKSGDEWRQFGLNHFVLPKVLITMEGNHTYLTYTVPRDEFNIEDLKALSEKIISTEVQPTTPNGEIKRCEDIYKDEWLNIVQEAIETMNEDEKIVLARRRMIQFNKDIDIAYVLENALKSESNSYIFVIESEQSVFFSQTPEQLMEVDNQVLSTKAVAGTIKRTNDEEEDKQHLNAFLQDKKNLHEHRFVVQSILDDIEPYVDDVDYNQHPKILKNDHLYHLYTEISGTLKNKTYIGLLDRLHPTPALGGYPKEKAVDFIEQREFGTRGLYGAPVGYIDMEDNCQFIVAIRSMLIKQNQATLFAGCGIIKQSEPESELAETTLKFTPMMNALGVENHG

SEQ ID NO: 94952 - protein, 452 aa, Staphylococcus pseudintermedius
  misc_feature (1)..(452): tr|A0A3D8YLT2|A0A3D8YLT2_STAPS Isochorismate synthase O S=Staphylococcus pseudintermedius OX=283734 GN=DV946_06 120 PE=4 SV=1
MSVDVCEQAIIDAVQQTKQRWVSVEVKLEQQLDPITLFDMSKEDAGDRFYFRLNDNETSFFGYRVAAKIKNDFTNKRSIFKEWEKFKDDIALIHPDSERHHLRICGGFQFSTKRMGDEWRRFGVNHFILPEVLISQVNQETFLTYTVQKEAFSIEQFYELVEKLNHLPRVVVQNTTPPQIKRIEDIYIDEWEALVEETTAKLAHDEKVVLSRRRMVQFDADIEIGAVLYRALKNEKNSYLFVLESEDDIFISQTPEQLFKVTNGMLSTKAVAGTIPRTHNEAQDQARINALLKNEKNLIEHGIVVESILEDIRPFIQYADYNREPQVLKNDHLYHLYTEIGGPLAHKSYIELIDDLHPTPALGGYPKARALEYIEAHEFGARGLYGAPVGMIDMYDDCEFIVAIRSMLMNHQQALLFAGAGIVKDSDAAEEVAETALKFKPMMVALGVSEHD

SEQ ID NO: 94953 - protein, 451 aa, Staphylococcus saccharolyticus
  misc_feature (1)..(451): tr|A0A431YM69|A0A431YM69_9STAP Isochorismate synthase O S=Staphylococcus saccharolyticus OX=33028 GN=CD121_0769 0 PE=4 SV=1
MAVNVKEDEIVNKLYGSSKDWVSVEVEINQSIDPSTLFHLTESQAGDRFYLRLNDNQSSYFGYHAIRKFKNNFENKQSIFKEWEALKKDIELIHPDSEKHHLRLCGGFQFSKHKSDDEWREYGLNHLVLPEVLISTEGQRHFITYTTERDKFDIDAFKTLVSQFEQANVDSYDEHIGNVTRMEDIYLDEWRDLVKEAIESIDYSKKIVLARRRLIKFDEEISIPYVLSKALKNEKNSYIFLLESNQSVFFSQTPEQLIKVENQVLSTKAVAGTIKRSHDEQEDQANINAFLNDKKNLGEHQFVVESILNDIQPYVEDVDYNETPNILKNDHLYHLYTQIEGKLNDHSYISLIDRLHPTPALGGYPKDEALEFIEKKEFGTRGLYGSPVGFIDVYDDCEFIVAIRSMLIKGDQATLFAGCGIVKDSDPDSEIAETAVKFSPMMNALGVDENE

SEQ ID NO: 94954 - protein, 450 aa, Staphylococcus saprophyticus
  misc_feature (1)..(450): tr|A0A380HGJ6|A0A380HGJ6_STASA Menaquinone-specific iso chorismate synthase OS=Staphylococcus saprophyticus OX= 29385 GN=entC PE=4 SV=1
MTLDDKESEIVEAVYESNQTWVSVEAKLDYELEPTLLFHLTEDCAGDRFYFKKNDNETSFFGYHAITRFKNDFENKQSIFREWEKYKNDIELIHPNSEKHHLKICGGFQFSTHKSGDEWREFGINHFVLPEVLVTMEAGQSFITYTVEADKFEMDAFLAIIDKLTQMDVQPNDEIGEIKRIDDIYKDEWRDLVKDTIDILDENKKIVLARKRLIMFDKNINIPYILNRAMQGEHNSYLFVLESKDSVFFSQTPEQLMEVKDDVLSTKAVAGTIKRTHRDDIDKANIDAFLNDKKNLNEHHFVVKSILNDIKPYVEQIAFNKKPQILTNDHLYHLYTKIEGRLIQNSYIGLLDNLHPTPALGGYPKEEAISYIENNEFGTRGLYGAPVGYIDMYDNCEFIVAIRSMLIKKNQATLFAGCGIVQNSDADSEVEETAVKFNPMMKALGVEKYE

SEQ ID NO: 94955 - protein, 450 aa, Staphylococcus schleiferi
  misc_feature (1)..(450): tr|A0A431YIC6|A0A431YIC6_9STAP Isochorismate synthase O S=Staphylococcus schleiferi subsp. schleiferi OX=74707 GN=CD117_12450 PE=4 SV=1
MALRTDLKQQIISEIDGNKNYISVEIELQYQPDLIHLLREEINYTGQHFYYKSKDSKLEMCGIGYLLEARYSHLEHDDIYEYWQNIKEQLDTIKLHDEKHHLKFFGGFQFSEHSLTNEWKDYGMSHFVLPKYLVTKENGHYYLTYTDHSNKFDIDNIQEVINILETENKKIESSEPVVVENKDIQSEEWKALVTKVVSQMNQSVALQKVVLSRRRQIEFEDRVNVEDALQRSLDSNESSYLLLFESGKSQFISQTPEQLCQIEDGKLYTNAIAGTILRTEDETKNDELKDELLNDSKNQFEHRYVVDSIIHDIQSFTKHIEYDKKPTILTNKHLYHLYTKIQADLLSENVLEIVNQLHPTPALGGFPKVEAIKFIEHEEFGTRGFYGAPLGYIDLENNGEFVVSIRSMLVNNHTATLYSGCGIVKDSEAISEFEETDLKFKPMLKALGVM

SEQ ID NO: 94956 - protein, 453 aa, Staphylococcus schweitzeri
  misc_feature (1)..(453): tr|A0A448CV44|A0A448CV44_9STAP Isochorismate synthase e ntC OS=Staphylococcus schweitzeri OX=1654388 GN=entC PE =4 SV=1
MATGVTEDDIVKEIYDSSKEWVSVEVKLSQSLDPSTLFHLTDNEAGGRFYMRLNDNRTSYFGYKAIQLFKNNFKNKQSIFREWEKLKQEIAFIHPQSGRHHLRIVGGFQFSSHKSDDEWREFGLNHFVLPEVLITTEDEDTFLTYTVQRENFDMDSFKALIEFFNNAMEIDVDDQNGEIIRNEDIYKDDWRQLVEEAIKSINKEEKIVLARRRLIKFDKVISIPYILKQAFSKEKNSYIFLLESQDSIFFSQTPEQLLKVNNRILSTKAVAGTIKRSHNEEEDKKHVEAFLKDNKNLVEHRFVVESILHDIEPYITELDYDKTPKILKNDHLYHLYTEIKAPLKDDSYIGLIDNLHPTPALGGYPKAFAIDFIEQKEFGTRGLYGAPVGYIDIYDDCEFIVAIRSMLIKQTQATLFAGCGIVKDSDPDSELAETNLKFSPMMNALGVDMNGKS

SEQ ID NO: 94957 - protein, 450 aa, Staphylococcus sciuri
  misc_feature (1)..(450): tr|A0A3S0JHY8|A0A3S0JHY8_STASR Isochorismate synthase O S=Staphylococcus sciuri subsp. rodentium OX=147469 GN=E KQ60_03655 PE=4 SV=1
MTVDVGEQEIIDAIANTSKTWISIEVRLPHTLDPVTLFRKTNQEAGNRFYFRLNDNETAFFGCRVAKEFKNNNKSKRSIFKEWNRFKEDIALIHPSTPKHHLRIYGGFQFSTERTSSEWQQFDMNHFILPEILISHIEGATYLTYTIRKTDFSFQEFKDIYTYLSHIDRTSHILEEHEMHVCAQQDLDIDAWERLVDKTIQQLKSDEKIVLSRRREIKFNTTIDIATVLDRALKNEKNSYLFLIESGNDCFISQTPEQLFKVQNNMLSTKAVAGTIKRTLNTEQDQAQVEAFLQDAKNLVEHHIVVESILEDIKPFVNDVHYHATPNILKNDHLYHLYTEISGPLATPNYIELIDVMHPTPALGGYPKAQAVQYIDAHEFNARGLYGAPVGMIDMYDDSEFIVAIRSMLINDNTALLFAGAGIVKESNAKAEVAETALKFSPMMDALGVN

SEQ ID NO: 94958 - protein, 450 aa, Staphylococcus simulans
  misc_feature (1)..(450): tr|A0A2X3QKM1|A0A2X3QKM1_STASI Putative menaquinone-spe cific isochorismate synthase OS=Staphylococcus simulans OX=1286 GN=menF PE=4 SV=1
MTVSVKDDQILDAIYESREKWVSVEVKIDQPTNPIMLYQMTEDKADDRFYFRENTGETAFFGYNALLKFKNDYENKQTIFREWENYKNDIALIHPDSNKHHLKVCGGFQFSSHKSDDEWRQFGLNHFVLPKVLITMTASETFVTYTVLREEFNIEDLHELVQQVAETKVEPTQPIGDVVRSEDIYKEEWLELVQEAIDSMNDEEKIVLARRRMIRFDRPIDIAYVLENAMHNESNSYIFVMQSEGSVFFSQTPEQLMEVENQVLSTKAVAGTIKRTSDETEDQKHVDAFLKDEKNLQEHHFVVQSILDDIEPYVTDVDYNKHPKILKNDHLYHLYTEISGALENNTYIGLLDRLHPTPALGGYPKEKAMDFIEQKEFGTRGLYGAPVGYIDMEDNCEFIVAIRSMLIKKKQATLFAGCGIIKQSDPQSELEETTLKFTPMMNALGVENHG

SEQ ID NO: 94959 - protein, 450 aa, Staphylococcus sp.
  misc_feature (1)..(450): tr|A0A3G4QXM0|A0A3G4QXM0_9STAP Isochorismate synthase O S=Staphylococcus sp. SDB 2975 OX=2044912 GN=CNQ82_04990 PE=4 SV=1
MTVSVKDDQILDAVYENSEKWVSVEIKIDQPTDPIMLFQMTEGQAKDRFYFRDNSGKTAFFGYNALLKLKNNHENKQSIFREWEKYKEEIALIHPDTSHHHLKVCGGFQFSTHKSGDEWRQFGLNHFVLPKVLITMEGNHTYLTYTVPRDEFNIEDLKALAEKIISTEVQPTTPNGEIKRCEDIYKDEWLNIVQEAIETMNEDEKIVLARRRMIQFNKDIDIAYVLENALKSESNSYIFVIESDQSVFFSQTPEQLMEVDNQVLSTKAVAGTIKRTNDEQEDKQHLDAFLQDKKNLHEHHFVVQSILDDIEPYVEDVDYNQHPKILKNDHLYHLYTEISGTLKNKTYIGLLDRLHPTPALGGYPKEKAVDFIEQREFGTRGLYGAPVGYIDMEDNCQFIVAIRSMLIKQNQATLFAGCGIIKQSEPESELAETTLKFTPMMNALGVENHG

SEQ ID NO: 94960 - protein, 444 aa, Staphylococcus stepanovicii
  misc_feature (1)..(444): tr|A0A239ZSB1|A0A239ZSB1_9STAP Putative chorismate bind ing enzyme OS=Staphylococcus stepanovicii OX=643214 GN= dhbC PE=4 SV=1
MKQKMISEINGDKSYISVEIELQYQPDLIHLLKKEIKYEGQRFYYNSKNHQLEMCGIGYVLQARYSHLKYDETYEYWQNVKEQLEKRVFHGGQHHLKFFGGFQFSEHALTNEWKDYGMSHFVLPKFLVTIEDNTCYVTYTEQSKHFDINEMDEFLNQLESNKIVMEEKEQEIMSNKDIQSEEWKDLVTKVVNLMNDSVALQKVVLSRRRNIIFKNKIDIEDALQRSLNINESSYLILFESGSSQFISQTPEQLCQIDNGKLYTNAIAGTILRTHDEQENQKLKETLLNDSKNLFEHRYVVDSIIHDIQSFTKNLNYEKKPTILTNTHLYHLYTNIQADLLSENVLEIVNQLHPTPALGGFPKLEAIKFIENEEFGTRGFYGAPIGYMDLDNNGEFVVSIRSMLVKDNMATLYSGCGVVKDSNADSEFEETDLKFKPMLKALGVM

SEQ ID NO: 94961 - protein, 451 aa, Staphylococcus warneri
  misc_feature (1)..(451): tr|A0A364UPP3|A0A364UPP3_STAWA Isochorismate synthase O S=Staphylococcus warneri OX=1292 GN=E4T90_00310 PE=4 SV =1
MTVNVREDEIVDKLYGSSKDWVSVEVELDKQLDPSTLFHITESQAGDRFYLRLNDNQSSYFGYHAIRKFENDFENKQSIFKEWETLKKDIELIHPDSEKHHLRLCGGFQFSKHKSDDEWRAYGLNHFVLPEVLISTENNRTFITYTTEKKTFEMDTFKSLVNDLEQANVDMEDDHLGNVTRMEDIYLDEWRDLVQEAINSIDYSKKIVLARRRLIKFDKEISIPYILTRALKNEKNSYIFLLESNESVFFSQTPEQLLKVENQVLSTKAVAGTIKRSQNEQEDEENLQAFLNDKKNLNEHQIVVESILNDIQPYVEDVYYNETPNILKNDHLYHLFTKIQGNLKEQSYIGLIDRMHPTPALGGYPKDEALEFIEQKEFGTRGLYGSPVGYIDVYDDCEFIVAIRSMLIKGDQATLFAGCGIVKDSDPDSEIAETAVKFSPMMNALGVDKHE

SEQ ID NO: 94962 - protein, 450 aa, Staphylococcus xylosus
  misc_feature (1)..(450): tr|A0A418IQG1|A0A418IQG1_STAXY Isochorismate synthase O S=Staphylococcus xylosus OX=1288 GN=BU097_03910 PE=4 SV =1
MTFDVKESEIVEAVYESNHTWVSVEAKLNYELDPTLLFHITEDCAGDRFYFKKNDNETSFFGYHAITRFKNDFENKQSIFREWEKYKNDIELIHPNSDKHHLKICGGFQFSTHKSGDEWREFGINHFILPEVLVTMEQGYTYITYTVKSDQFEISTFLSIIDKLTQTTVYPDFEIGNIKRIEDIYKDEWRDLVKDTIDILDESKKIVLARKRLIIFDKQIKIPYILNKASQGEHNSYLFILESQDSIFFSQTPEQLMEINNEILSTKAVAGTIKRTHQAELDKENIQAFLNDEKNLNEHRFVVESILNDISPYVEDVTYNQEPQILTNDHLYHLYTKIKGQLKYESYIGLLDNLHPTPALGGYPKFEALEYIEQNEFGTRGLYGAPVGYIDMYDNCEFIVAIRSMLIKKNQATLFAGCGIVSDSDADSEVEETAVKFNPMMKALGVEEYE

SEQ ID NO: 94963 - protein, 404 aa, Starkeya sp.
  misc_feature (1)..(404): tr|A0A556PHE0|A0A556PHE0_9RHIZ Isochorismate synthase O S=Starkeya sp. 3C OX=2597768 GN=FO470_00275 PE=4 SV=1
MCDAAEKAAAEAAPFAPALPFALVSGEETLVGRGCLGLVEDGPSPLGERARALIEAEGAGPRLVVGALPFDRAAAPHLYRPAELSRSAGRSCFAAAFPPPSLVRGAAPPPRWEVTPEPSLVAYESAVAEALSRMARREEGLRKIVLSRSLRLLADRAIDASALLRALSEDASVTAFCVPLVAAGSGEASRALVGATPELLLSKRGARVVSHPLAGSARRAREDAADRAAAEGLLASEKDRREHREVVTAILDLLAPYCTELAAPEAPALAATASMWHLGTRIVGRLRDAATSALDLAALLHPTPAVCGTPRAAAARAIAELEGYKRGFYAGAVGWCDAAGDGAWHVAIRCAEIAGREARLFAGAGIVAGSDPVAEGEETSAKFTALLGALGIDEHGRVRSEEQA

SEQ ID NO: 94964 - protein, 397 aa, Stenotrophomonas maltophilia
  misc_feature (1)..(397): tr|A0A3R8TDV9|A0A3R8TDV9_STEMA Isochorismate synthase O S=Stenotrophomonas maltophilia OX=40324 GN=EGJ24_20640 PE=4 SV=1
MNDSLMQGAWPEAAPAPQENTDDASLFLLQHAGQHVHARGCRAALPAGALATLAERVSEFFAQQRGGPGLLVGAVPFEPRADDALYQPERLLPALALQPQAAPPLDGALRAEPVPQDYASAVAAAVQVLRAPEQNLHKVVLARSLLARTREALSPDVLLARLGADPSVATYAVPLPVELGQAPAWLVGATPELLLRKRGAELLSHPLAGSARRSADAAEDERAAQALLASTKDHDEHRHVVDAIVEGLAPYCSHIDAQPRPVLHATASMWHLGTRIHATLKDPQTSAAELLAQLHPTPAVCGTPRLAALQRIRELEPVPRGFYAGAVGWLDAQGDGDWYVAIRCARLQGTQLRLYAGAGIVAESEPEAEVAETAAKFAALLNALGVHESAPSIEPAA

SEQ ID NO: 94965 - protein, 397 aa, Stenotrophomonas sp.
  misc_feature (1)..(397): tr|A0A4Q1CWM4|A0A4Q1CWM4_9GAMM Isochorismate synthase O S=Stenotrophomonas sp. MA5 OX=2508572 GN=ERT44_03985 PE =4 SV=1
MNDSLRDDAWQETAPLPLPAADDPTLFLLQHAGQHVHARGCRAALASGPLVTLAGRVAAFFAQQRGGPGLLVGAIPFEPRADDALYQPERVLPALPVQPQAAPALEGVVQAEPSADDYAAAVDRAVQALRDPRQDLHKVVLARSLLAHTRHALTPDVLLARLGADPSVATYAVPLPVELGQAPAWLVGATPELLLRKRGAQVLSHPLAGSARRSADPVQDERAAQTLLASAKDHDEHRHVVEAIVDGLSPYCSHIDAQARPVLHATATMWHLGTRIHATLKDPRVPAAALLAQLHPTPAVCGTPQQAALQRIRELEPVPRGFYAGAVGWLDAQGDGDWYVAIRCARLQGTQLRLYAGAGIVAGSQPQAEVAETAAKFAALLNALGVSEPAPPTEPLA

SEQ ID NO: 94966 - protein, 406 aa, Stigmatella aurantiaca
  misc_feature (1)..(406): tr|E3FDX2|E3FDX2_STIAD Isochorismate synthase OS=Stigma tella aurantiaca (strain DW4/3-1) OX=378806 GN=STAUR_35 97 PE=4 SV=1
MTTERPMPPQKLAAQLLESYEAGSSFFFASPKRTMLARGTFATVPHMDGADALQRLPERVAAVLNNAREAAHDIPVAVGAVPFDGSIPAQMVVPMTLQRAGPLVFDADVPVHQPLAARYTVQPVPEPAAYLDGVTQALKLMQTGSLRKVVLSRSLHLSATTPIDLPQLLRNLAQRNPSGYTFAVDLPTETAGGRRRTLIGASPELLVSRSGLQVLANPLAGSAARSADPIEDQERAATLLKSPKDLHEHAVVIDAVVEAMRPYCKKLDVPAGPSLVSTQTMWHLSSRICGELADPSITSLKLAVALHPTPAVCGYPTELAHEAITTIEPFDRGFYTGTVGWCDVNGDGQWAVTIRCAEADERTLRLFAGAGIVVGSKPESELAETEAKFRTMLQAMGLGQNSEVKS

SEQ ID NO: 94967 - protein, 476 aa, Streptococcus dysgalactiae
  misc_feature (1)..(476): tr|A0A4U9ZKQ5|A0A4U9ZKQ5_STREQ Anthranilate synthase co mponent I OS=Streptococcus dysgalactiae subsp. equisimi lis OX=119602 GN=entC PE=4 SV=1
MSRLAPLSQCLHALRGTFERAIGQAQALDRPVLVAASFEIDPLDPLQVFGAWDDRQTPCLYWEQPELAFFAWGCALELQGHGEQRFARLEDSWRLLCAEAVVEGPLAPRLCGGFRFDPRGPRQEHWQAFADASLMLASLTVLREGERHRVLCQHLAKPGEDALALAAFHCSALLRLRQPARRRALPANAGEQQDASPLERRQWEGKVADAVRGVRQGRFGKVVLARAQVQPLGEIEPWQVLEQLRLRHAEAQLFACRRGNACFLGASPERLVQVRDGALRTHALAGTTARGGDAGEDTRLGQALLDSAKERHEHQLVVEAIRAALEPFSEALRIPATPALKRLARVQHLNTPIQARLADGQGILRLVEALHPTPAVGGYPRSAALDHIRQHEGMDRGWYAAPLGWLDGEGNGDFLVALRSALLTPGQGYLFAGCGLVGDSEPSHEYRETCLKLSAMQDALSAAGGLGEAPLQRGVA

SEQ ID NO: 94968 - protein, 391 aa, Streptococcus pneumoniae
  misc_feature (1)..(391): tr|A0A4U9M3W6|A0A4U9M3W6_STREE Anthranilate synthase co mponent I OS=Streptococcus pneumoniae OX=1313 GN=trpE_1 PE=4 SV=1
MDTSLAEEVQQTMATLAPNRFFFMSPYRSFTTSGCFARFDEPAVNGDSPDSPFQQKLAALFADAKAQGIKNPVMVGAIPFDPRQPSSLYIPESWQSFSRQEKQTSARRFTRSQSLNVVERQAIPEQTTFEQMVARAAALTATPQVDKVVLSRLIDITTDAAIDSGVLLERLIAQNPVSYNFHVPLADGGVLLGASPELLLRKDGERFSSIPLAGSARRQPDEVLDREAGNRLLASEKDRHEHELVTQAMKEVLRERSSELHVPSSPQLITTPTLWHLATPFEGKANSQENALTLACLLHPTPALSGFPHQAATQVIAELEPFDRELFGGIVGWCDSEGNGEWVVTIRCAKLRENQVRLFAGAGIVPASSPLGEWRETGVKLSTMLNVFGLH

SEQ ID NO: 94969 - protein, 398 aa, Streptomonospora alba
  misc_feature (1)..(398): tr|A0A0C2JU94|A0A0C2JU94_9ACTN Isochorismate synthase O S=Streptomonospora alba OX=183763 GN=LP52_00670 PE=4 SV =1
MFHQYNHPAAAAAGDLLDAYRPGNAFLAAPSGAILGEGAAAAAERLEDVGDLLAQGTADSASGPIAIGAIPFDAAAPGRLVVPDRVRQAPPLTESRNSHRGQRPLPGPWAMRPLPEPAEHAAGVERLLKRLARGDGDDGPAKIVLARSLRLSGPGPVDVGQLLNNLAWRDPAACTFALDLPAASPAPRTLVGASPELLVAKRGGRVVSNPLAGSAPRSADPSKDQLSAVELLGSAKDRHEHAVVVEAVTEALRPYCRTLEVPEPELARTATLWHLSTRVTGELIDPATPSPVLAAALHPTPAVCGSPTDAARAAIAEIEPFDRGFYTGAVGYTDARGDGEWIVSIRCADVAGDTLDLFAGGGIVGDSEPDAELAETSAKLRTLLLALGVNQPLIAPPR

SEQ ID NO: 94970 - protein, 427 aa, Streptomonospora sp.
  misc_feature (1)..(427): tr|A0A4P6Q5F4|A0A4P6Q5F4_9ACTN Salicylate biosynthesis isochorismate synthase OS=Streptomonospora sp. M2 OX=24 98135 GN=pchA PE=4 SV=1
MTTAPHDPADLPALTVRTVPLAGAPDLIARLGPAAPMAWLRRGEGLVGWGEAARLEFPAESAPEGTGRFAGAARALDALRARARVLDEVGAPGTGPVAFGGFTFDPRSGGSVLVVPRVVVGYRGGRAWVTTAARGGEEQPAEAPDAIAEGPPPAPVGPLDWQAGSLSAGEWGAAVGRAVERIRGAELDKVVMARDVIARARAPIDVRTLLGRLARSYPDCYTFSVAGMVGATPELLLRREGDEVESLVLAGTRPRAADPGEDARLGRELQESAKDREEHRYAIDSLRATLAPLCASVEAPERPRLLRLANVQHLASPARARLLPGASTLDAVAALHPTAAVGGSPTGAAMRMIRELEGMDRSRYAGPVGWIDGDGNGEWGIALRCALVEGARARLFAGCGIVAGSEPAAEVAESESKLQVMRAALTD

SEQ ID NO: 94971 - protein, 122 aa, Streptomyces albireticuli
  misc_feature (1)..(122): tr|A0A2A2CZK1|A0A2A2CZK1_9ACTN Isochorismate synthase ( Fragment) OS=Streptomyces albireticuli OX=1940 GN=CK936 _33660 PE=4 SV=1
MTTAHHVADRPSEPGVPAPAGSGPAAPGAPGHRPAGAADTVGAATSLLDAYEPGRARFFASPTRTLLAHGVRAEVPHGTTPLVRRVTETLDAQLLAGHEAPVVIGAVPFAPTAPAALAVPEA

SEQ ID NO: 94972 - protein, 414 aa, Streptomyces albus
  misc_feature (1)..(414): tr|A0A0X7JBR2|A0A0X7JBR2_9ACTN Isochorismate synthase O S=Streptomyces albus subsp. albus OX=67257 GN=ADL21_332 30 PE=4 SV=1
MPTAPEVATHVPLAEPAHPAVGWGLPCSNEAESLGKATALLDAYTPGARFLGTPTRTILAQGTHRDVPHDERPLPQRVAATLDAARAAGHGAPLVVGAVPFDQTAPAALTVPGSVRTAPPLTADPLIALPADPPAAAAWDIRPVPEPEVYGAGVAAAVERMWRGEFSKVVLARTLELTTNDPLDIPAMLQRLARRDPSGYTFALPTAPGRTLLGASPELLVSRRGDRVVANPLAGSTPRSDDLAEDVRRAAALLESAKDLHEHAVVVDAVHRALAPYCTGLTVPARPTLLRTATMWHLSTTVTGTLAAPDTSALELACALHPTPAVCGTPTGTARQVITDTEPFDRGFFTGMVGWGDASGDGEWVVTIRCAEAEERSLRLYAGAGVVAASEPAAETAETGAKFRTFLSAVGAEL

SEQ ID NO: 94973 - protein, 395 aa, Streptomyces caatingaensis
  misc_feature (1)..(395): tr|A0A0K9XNE2|A0A0K9XNE2_9ACTN Isochorismate synthase O S=Streptomyces caatingaensis OX=1678637 GN=AC230_02840 PE=4 SV=1
MPDRPASGPGPDTVGAATALLEGYDHRDARFFASPTRTLLAHGVRAEVPHGDAPLHRRVTETLDAQLLDGHENPVVVGAVPFLPGAPAALAVPRTVRLAPPLSHDPLAALPAAPPAALDWDVRPVPEPAGYAAAVATAVARMKRGEFGKVVLSRTLELTAPQDPDLPGLLRRLARRDPSGYTFAVPSGPGRTLLGASPELLLSKRGGRIVTNPLAGSTPRSADLAEDVRRAAALLESEKDLHEHALVVDAIREALAPYCRTMDVPRRPTLVRTAAMWHLSTTITADPTDPGVSALELACALHPTPAICGTPTDTARTVIGELEPFDRGPYTGMVGWGDANGDGEWVVTIRCAEAEGRTLRLFAGAGIVEQSDPEAETAETAAKFRTFLQAVGVDR

SEQ ID NO: 94974 - protein, 390 aa, Streptomyces cinnamoneus
  misc_feature (1)..(390): tr|A0A2G1XAX9|A0A2G1XAX9_STRCJ Isochorismate synthase O S=Streptomyces cinnamoneus OX=53446 GN=BLA24_32605 PE=4 SV=1
MPADRDATVGAATSLLDAYEPGRARFFASPTRTLLAHGARAHVPHGDAPLARRVAETLDAELLAGNAAPVVVGAVPFDHTAPAALAVPEAVRWAPPLAEDPLVALPAAPPAPAAWDVRPVPEPGVYGDAVAEAVRRMNRGEFSKVVLARTLELRSSRDLDLPALLQRLARRDPTGYTFAVPSGPGRTLLGASPELLVSRRGGRLVANPLAGSTPRSADLAEDVRRAAALLESAKDLHEHAVVVDAVRAALAPYCRTLEVPARPTLVRTATMWHLSTTVTGEPADPAVSALELASALHPTPAVCGTPTATARDVIGELEPFDRGFFTGMVGWGDANGDGEWVVTIRCAEAAERSLRLYAGAGVVAQSSPEAETAETGAKFQTFLQAVGVDQ

SEQ ID NO: 94975 - protein, 398 aa, Streptomyces dengpaensis
  misc_feature (1)..(398): tr|A0A2L2MF49|A0A2L2MF49_9ACTN Isochorismate synthase O S=Streptomyces dengpaensis OX=2049881 GN=C4B68_04530 PE =4 SV=1
MSAFLRDTTATPFVSPGAATALLDAYRPATDRFLASPHHTLLGRGTAAGIPHDTRPLTWRVRNVLNARRRAGASAPVVVGSVPFAPDAPHSLVSPQSVQWGPPLREDPLIALPALLPEGGTVWQVREVPAPEQYGQAVADAVTRMRSGEFTKVVLARTLELTSPDEPDLPAMLSRLARRDPAGYTFAVPSGPGRTLIGASPELLVARTGGRLTGNPLGGSAARSTDLAEDVQRAAALLESPKDLHEHAVVVDAVREALAPFCTRLEVPERPTLVRTATMWHLSTTVTGELTDPGVTALELALALHPTPAVCGTPTDVARAVIAESEPFDRGPYTGMVGWQDADGDGEWVVTIRCAEAEGRSLRLFAGAGVVAASSPEAETAETGAKFRTFLEAMGASL

SEQ ID NO: 94976 - protein, 381 aa, Streptomyces eurocidicus
  misc_feature (1)..(381): tr|A0A2N8NVA7|A0A2N8NVA7_STREU Isochorismate synthase O S=Streptomyces eurocidicus OX=66423 GN=AF335_18965 PE=4 SV=1
MLDAYEPGRARFFASPTRTLLAHGVRAEVPHGTAPLVQRVTETLDAQLLAGHAAPVVIGAVPFDPTAPAALAVPEAVRWAPPLAEDPLIALPAAAPAAARWDIRPVPEPAVYGAAVAEAVRRMKRGDFSKVVLARTLELRSDRDLDLPALLQRLARRDPSGYTFAVPSAPGRTLLGASPELLVARRGRTLVANPLAGSTPRSADLAEDVRRAAALLQSEKDLHEHAVVVDAVREALAPFARTLDVPARPTLVRTAAMWHLSTTVTGELADPAVSALELAAALQPTPAVCGTPTDVARDVITELEPFDRGAYTGMVGWGDARGDGEWVVTIRCAEAEGRTLRLFAGAGVVEQSSPEAETAETGAKFRTFLDAVGADQQEAGR

SEQ ID NO: 94977 - protein, 401 aa, Streptomyces formicae
  misc_feature (1)..(401): tr|A0A291QAC0|A0A291QAC0_9ACTN Isochorismate synthase o f siderophore biosynthesis OS=Streptomyces formicae OX= 1616117 GN=KY5_3429 PE=4 SV=1
MSTAPEVATHVTTAEQAHPAVGAATALLDAYTPGERFLATPTRTLLTEGVHAHVPHDERPLPHRIAATLADARRTGPAKPYVVGAIPFDHTAPAALAVPRALRTAPPLTADPLIALPADPPDATDWRIRPVPSPEAYGAGVASAVERMWRGDFSKVVLARTLELTAQAPLDLPVMLQRLARRDPSGYTFALPTAPGRTLIGASPELLVSRRGHQVVANPLAGSTPRSDDLAEDVRRAAALLESAKDLHEHAVVVDAVHQALASFCTDLTVPARPTLIRTATMWHLSTTVTGTVASPDTSALELACALHPTPAVCGTPTATAREVIRETEPFDRGFFTGMVGWGDANGDGEWVVTIRCAEAEERSLRLYAGAGVVAASEPEAETAETGAKFRTFLNAVGAEL

SEQ ID NO: 94978 - protein, 404 aa, Streptomyces griseocarneus
  misc_feature (1)..(404): tr|A0A3L8J5B7|A0A3L8J5B7_9ACTN Isochorismate synthase O S=Streptomyces griseocarneus OX=51201 GN=CTZ27_22085 PE =4 SV=1
MTTPLRQPGLAIAEQDPSPVTPGEAVALLDAYRPGTDRFLATPRRTLLAHGTAAEVPDDGRPLPQRVHDLLNALRQPGEPAPLLLGAVPFAPGARPSLAVPMSVRSAPALCEDPLIALPAPDAVDGAGWQVREWPPAEGYAAAVASAVHRIRAGEFDKVVLARTLELTAPHMPDLPAMVNRLARRDPSGYTFAVPTGPDRTLLGASPELLVARQGGLLTANPLAGSAQRSTDLAEDVRRAAALLESPKDLHEHAVVVDAVRDALAPFCRRLEVPERPTLVRTATMWHLSTTVTGEVADPSVTALDLASALHPTPAVCGTPTDVARTVIAESEPFDRGAYTGLVGWQDADGDGEWVVTIRCAEAEGRTLRLFAGAGVVGDSSPEAETAETAAKFRTFLDAVGAAL

SEQ ID NO: 94979 - protein, 401 aa, Streptomyces griseoflavus
  misc_feature (1)..(401): tr|A0A0L8MMR4|A0A0L8MMR4_9ACTN Isochorismate synthase O S=Streptomyces griseoflavus OX=35619 GN=ADK76_35160 PE= 4 SV=1
MPTAPEVATHVPLAEPAHPAVGAATSLLDAYTPGARFLGTPTRTILAQGTHRDVPHDERPLPQRVAATLDAARAAGHGAPLVVGAVPFDQTAPAALTVPGSVRTAPPLTADPLIALPADPPAAAAWDIRPVPEPEVYGAGVAAAVERMWRGEFSKVVLARTLELTTTDPLDIPAMLQRLARRDPSGYTFALPTAPGRTLLGASPELLVSRRGDRVVANPLAGSTPRSDDLAEDVRRAAALLESAKDLHEHAVVVDAVHRALAPYCTDLTVPARPTLLRTATMWHLSTTVTGTLAAPDTSALELACALHPPPAVCGTPTDTARQVITDTEPFDRGFFTGMVGWGDASGDGEWVVTIRCAEAEERSLRLYAGAGVVAASEPAAETAETGAKFRTFLSAVGAEL

SEQ ID NO: 94980 - protein, 650 aa, Streptomyces griseus
  misc_feature (1)..(650): tr|A0A380NDG8|A0A380NDG8_STRGR Anthranilate synthase OS =Streptomyces griseus OX=1911 GN=menF PE=4 SV=1
MAPTSPAAPPPPAEPYDLARLTAPGAGPFALLRRSAPGLDGRTVEVLTGPVREVERLADLPVDGRPALALVPFRQIRERDFDVRDDGTGLVVLHADAVHRMPVDEALAALPAHRVEVADGGFDLDDEGYEEVVRRVVTDEIGRGEGANFVISRTWQGRIEGFSRADALALFRRLLAQERGAYWTYVVHTGERTLVGASPEAHVRMSGGARDGVASGTGGTVVMNPISGTYRYPAGGPTAEGVLEFLADAKERDELSMVVDEEMKMMCAVGDLGGVVVGPRLKEMAHLAHTEYELRGRSTLDVREVLRQTMFAATVTGSPVQNACRVIERYEPAGRGYYAGALALLFTDEAGAQCLDSPILIRTADIDPAGVVRVRVGATLVRGSDPAGEVAETHAKAAGVLAALGVRPGRPAGGAAPVRFADDIRVRAALDARRERLSPFWLRMREPAAAVAGDALVVDAEDTFTSMLAHVLRAAGHRVAVRRFDEPGLRAAVAAHRGTVVLGPGPGDPSDPADPRMRLLREVTREVLDGRHGGRGVLGVCLGHELIAAELGLPLVRKRVPHQGAQVRIDLFGRPETVGFYNSYVASCDDEAAAELAAHGVEVSRDAAGEVHALRGPGFASVQFHPESVLSLRGPALVAELLAGVPAEVG

SEQ ID NO: 94981 - protein, 407 aa, Streptomyces hoynatensis
  misc_feature (1)..(407): tr|A0A3A9YSG1|A0A3A9YSG1_9ACTN Isochorismate synthase O S=Streptomyces hoynatensis OX=1141874 GN=D7294_22740 PE =4 SV=1
MSSVPDLARQPPTPLPSAVGAATALLDAYAPGARFLATPTRTLLAGGVHSTVPHGETPLSERVAAALGAARAAGHPAPLALGAVPFDERAPAALVVADALRTAPPLSADPLSALPAKPPAPADWRIRQVPAPERYGALVAAAVRRMREGGLRKVVLARTLELDADRPLDLPGVLRGLARRDPAGYTFALPTGPGRTLLGASPELLVSRTGGRLVANPLAGSAPRSADLAEDIRRAAALLESPKDLHEHAVVVDAVRAALAPHCARLHVPARPTLVRTAAMWHLSTTVTGDLGARPASALELARALHPTPAVCGTPTAEARRVIRETEPFDRGWFTGMVGWMDAGGDGEWVVTLRCAEAGERSVRLYAGAGIVPASRPAAEIAETAAKFRTFLTALGAGGQPVRQPGR

SEQ ID NO: 94982 - protein, 414 aa, Streptomyces jeddahensis
  misc_feature (1)..(414): tr|A0A177HSL8|A0A177HSL8_9ACTN Isochorismate synthase D hbC OS=Streptomyces jeddahensis OX=1716141 GN=dhbC PE=4 SV=1
MNRGLTRAGRGPMPDHARPRTGRSRRRLIAAPAGFLLHGPSGSVGLDGPLTSFRGLSEAENAVREGTHGNIVAGAVPFDQESGTSSFYLGRRVTGRPAVLGRPTRRSQFVPDVIFNDTEIAGYIRMVDHVLPMLRSPNDVLEKIVAARAERFFTTEPVDPLQLYGRIVDMYPRVHSYLVEHLETPGVYTMGASPELFVKKTGDIVTMTPLAGTIPRNPSLSTPEDTARAHAELFTDKYLVEHRHLVEFMLKGLAPFCTVVDHTHEPQLIDVPGVWHLGTPIRGRLTSPGVRVADLVSALHPSPAVCGVPQSASLQLITTNESPRGYYGGLVGWLDSNGDCELYMALRGLDFDARNGCLTLRAGGGIVKGSRMDVEFTETTAKLATMRRVLGITPLLEASASSRSGRPVREAANA

SEQ ID NO: 94983 - protein, 400 aa, Streptomyces lavendulae
  misc_feature (1)..(400): tr|A0A5C8GZ90|A0A5C8GZ90_STRLA Isochorismate synthase O S=Streptomyces lavendulae OX=1914 GN=E2C11_17850 PE=4 S V=1
MSLSTLMRPSPMHRPSDLLAAYLTGSFYFSSARGTLLADGVHTRVRAGSGARALAAAEALDAAAVAGLPDPVVVGAAGFRPDGDAGLLVPAVVRRAGAPSALAGHPRQPGPGTGWTVRPRPEPEGYTAAVSRALELIGDGELRKVVLARSLELAGEHPVAVPALLTRLVHADPASYAFAADVTAPGDPAPRTLVGASPELLVSRRGAHVTANPLAGSAPRAGDERLDRERIARLRDSAKDLGEHAHTAAQVAEVLGRFCADLDVPERPEVIGTPTMWHLSTRITGRLRDPLDPACSALGLAEALHPTPAVCGVPAPRALTAIAELEPEDRGYYAGMVGWSGLDGDGEWAVTIRSAEVCDRTVRLFAGAGIVPGSDPQAELAETSAKFRTLLRALGLEHLV

SEQ ID NO: 94984 - protein, 403 aa, Streptomyces lydicus
  misc_feature (1)..(403): tr|A0A3Q9K757|A0A3Q9K757_9ACTN Isochorismate synthase O S=Streptomyces lydicus OX=47763 GN=DDE74_05045 PE=4 SV= 1
MSASLCEPTAPPPDPTLPLLAPGAATTLLDAYLPGADRFLASPRHTLLAHGTAAEIPHDTRPLTRRVRDTLDARRRAGDPAPVVVGSLPFAADAPHALVVPDSVRWAPPLHEDSLIALPVAPAEDTDWQLREVPSAERYAAAVAAAVARMQAGEFDKVVLARTLELTAQREPDLTAMLRRLARRDPAGYTFAVPSGAGRTLIGASPELLVARRNGRLVANPLAGSAPRSADLAEDVRRAAALLESAKDLHEHAVVVDAVREALAPYSTGLEVPARPTLVRTAAMWHLSTTVTGELADPAVSALELASALHPTPAVCGTPTDVARSVIAESEPFDRGPYTGMVGWQDADGNGEWVVTIRCAEAEGRTLRLFAGAGVVAASSPQAETAETGAKFRTFLSAVGASL

SEQ ID NO: 94985 - protein, 319 aa, Streptomyces malaysiensis
  misc_feature (1)..(319): tr|A0A291T3Z7|A0A291T3Z7_9ACTN Menaquinone-specific iso chorismate synthase OS=Streptomyces malaysiensis OX=926 44 GN=SMALA_7639 PE=4 SV=1
MAFPFQRHEPIRLAVPARTLSLSQEEAADHRRLLASVPSPSAKSGEPGTYALRPSESPEQWCGSVADAARAVRRGELRKAVLARRIQMECDADIQPSVVLRRLAHTFPSAYLFSAFGLVGASPELLLAKRGRMVESRALAGTIRRGGDAESDRRLAAWLQESGKNQEEHRVLREAVLDALAPSTTWIEANERPEMLKLANVQHLMTRVRAELVADHPSFLRLAAMLHPTPAVCGWPRDKAYEVIERLDGWDRGLYGGALGWVDAKGDGCLCVTIRCAEIHGKNATMYVGNGIVADSDPKEELAETRAKLGAILPALIAP

SEQ ID NO: 94986 - protein, 401 aa, Streptomyces nanshensis
  misc_feature (1)..(401): tr|A0A1E7LNV8|A0A1E7LNV8_9ACTN Isochorismate synthase O S=Streptomyces nanshensis OX=518642 GN=AN221_26475 PE=4 SV=1
MSTASQVATHVPPADPAHPAVGAATSLLDAYAPGDHFLATPGRTLLARGAGRQVPHDGRPLTERVDAALAEAVAAGQESPVVIGAIPFDHTAPAALHIPATVRSAPPLASDPLIALPAGSSATADWRIRPVPEPEVYGEGVAAAVARMWRGEFSKVVLARTLELTSDAPLDLPAMLQRLARRDPSGYTFALPTGPARTLIGASPELLVSRRGNQVVSNPLAGSTPRSDDLAEDVRRAATLLESVKDLHEHAVVVDAVHQALAPHCTDMTVPARPTLIRTATMWHLSTTVTGTLTSPDTSALDLAMALHPTPAVCGTPTQTARQVIAETEPFDRGFFTGVVGWGNAEGDGEWVVTIRCAEAEERTLRLYAGAGVVAASEPEAETAETGAKFRTFLSAVGAEL

SEQ ID NO: 94987 - protein, 428 aa, Streptomyces netropsis
  misc_feature (1)..(428): tr|A0A445NJM7|A0A445NJM7_STRNE Isochorismate synthase D hbC OS=Streptomyces netropsis OX=55404 GN=dhbC PE=4 SV= 1
MTTVHHVADRPSEPGARADGRLTAVPGGVGQRIERPEDTVGAATSLLDAYEPARARFFASPTRTLLAHGTRTEVPHGGTPLARRVTETLDAELLAGNPAPIVVGAVPFDQSAPASLAVPQAVRWAPPLSEDPLIALPAAAPAAADWDIRPIPEPDVYGAAVAEAVRRMRRGDFSKVVLARTLELRSSRELDLPALLQRLARRDPAGYTFALPTGPGRTLLGASPELLVARRGGALIANPLAGSTPRSADLAEDVRRAAALLESEKDLHEHAVVVDAVRAALAPFCRTLDVPERPTLVRTAAMWHLSTTVTGELADTAVSALELACALHPTPAVCGTPTTTARDVITELEPFDRGNFTGMVGWGDASGDGEWVVTIRCAEARTEERTLRLYAGAGVVAQSTPEAETAETGAKFRTFLDAVGADHQESGR

SEQ ID NO: 94988 - protein, 400 aa, Streptomyces nitrosporeus
  misc_feature (1)..(400): tr|A0A5J6F3R8|A0A5J6F3R8_9ACTN Isochorismate synthase O S=Streptomyces nitrosporeus OX=28894 GN=CP967_01495 PE= 4 SV=1
MSTSLRVPSSSPPLGAPGTATALLEAYRPGTDRFIATPRLTLLGSGSAAEVPRDARPVSERVRETLAARRLAGDSDPVVIGALPFSPDGTHSLAVPRTLRRAPALREDPLIALRGPDVEHAADWRIREVPAAAEYGRAVAAAVARMRAGEFDKVVLARALDLTSPHELDLPGMLSRLARRDPEGYTFAVPSGPGRTLIGASPELLVARRGGRLVANPLAGSAPRSGDLAEDVRRAAALLESPKDLHEHAVVIDAVREALAPFCTRLEVPERPTLVRTAAMWHLSTTLTGELADPESTTALDLASALHPTPAVCGTPTDVARAVIAESEPFDRGAYTGVLGWQDADGDGEWVVTIRCAEAEGRTLRLFAGAGVVAESSPAAETAETGAKFKTFLNAVGATL

SEQ ID NO: 94989 - protein, 381 aa, Streptomyces rimosus
  misc_feature (1)..(381): tr|A0A0M9XC26|A0A0M9XC26_STRRM Isochorismate synthase O S=Streptomyces rimosus subsp. rimosus OX=132474 GN=ADK4 3_35915 PE=4 SV=1
MGKATALLDAYTPGARFLGTPTRTLLAQGTHSEVPHDERPLPQRVAATLDAARAAGHGAPFVVGAVPFDQTAPAALTVPGSVRTAPPLTADPLIALPADPPAAAAWDIRPVPEPEVYGAGVAAAVERMWRGEFSKVVLARTLELTTPDPLDVPAMLQRLARRDPSGYTFALPTAPGRTLLGASPELLVSRRGDRVVANPLAGSTPRSDDLAEDVRRAAALLESAKDLHEHAVVVDAVHRALAPYCTGLTVPARPTLLRTATMWHLSTTVTGTLAAPDTSALELACALHPTPAVCGTPTDTARQVITDTEPFDRGFFTGMVGWGDASGDGEWVVTIRCAEAEERSLRLYAGAGVVAASEPAAETAETGAKFRTFLSAVGAEL

SEQ ID NO: 94990 - protein, 424 aa, Streptomyces rubellomurinus
  misc_feature (1)..(424): tr|A0A0F2TDE4|A0A0F2TDE4_STRR3 Isochorismate synthase O S=Streptomyces rubellomurinus (strain ATCC 31215) OX=35 9131 GN=VM95_20665 PE=4 SV=1
MHHAPAGTPAAAPAGPPAHAPDQAVIGAASGLLGQYRAATDEAFFASPTRTLLTSGAHARVPQDARPLAQRVAHALAEAEANAEARADAKAEAGTRSADSRRPLVVGAVAFDHDRRAELVVPALVRTAGALRDDPLIALPAPPADRVDWQLRPVPAPEAYGAGVAAAVERLRGGELSKVVLARTLELTADRPLDLPAVLQRLARRDPGGYTFAVPAGPGRTLIGASPELLLSRRGTAVLANPLAGSVPRSDDLGEDVRRAAALLESPKDLHEHAVVVDAIRTALAPHCRTLDVPERPTLVRTAAMWHLATTISGELADPAVTALDLATALHPTPAVCGTPTDLARRVIGEVEPFDRGLYTGMVGWQDAAGDGEWVVTIRCAEAEQRTLRVYAGAGVVDRSRPEAELAETSAKFRTFLDAAGVPR

SEQ ID NO: 94991 - protein, 317 aa, Streptomyces sp.
  misc_feature (1)..(317): tr|A0A014N263|A0A014N263_9ACTN Isochorismate synthase O S=Streptomyces sp. PRh5 OX=1158056 GN=Z951_12020 PE=4 S V=1
MAFPFQRQEPIRLAVPARTLSLEETPDRRRLLASVPTPSAKSGEPGAFALRPSEPPEQWCGSVADAARAVRRGELRKAVLARRIQMECDTDIQASVVLRRLAHSFPSAYLFSAFGLVGASPELLLAKRGRMVESRALAGTIRRGGDAESDRRLASWLQESGKNQEEHRVLREAVLDALTPSTTWIKANERPETLKLANVQHLMTRVRAELKADHPPFLRLAAMLHPTPAVCGWPRDKAYEVIERLEGWDRGLYGGALGWVDAEGNGCLCVTIRCAEIHGKNATMYVGNGIVADSDPKEELAETRAKLGAILPALIAP

SEQ ID NO: 94992 - protein, 159 aa, Streptomyces varsoviensis
  misc_feature (1)..(159): tr|A0A0L8M026|A0A0L8M026_9ACTN Isochorismate synthase ( Fragment) OS=Streptomyces varsoviensis OX=67373 GN=ADK3 8_46420 PE=4 SV=1
MGLATGLLDAYAPGDARFFASPTRTLLAHGVRAEVPHDERPLPRRVAETLEARRAAGDPAPLVVGAVPFDQDAPAALAVPETARWAPPLAEDPLIALPPAARWQIRPVPEPAVYGDAVAEAVRRMKRGDFSKVVLARTLELTAPAGTDATAAPDLPGLL

SEQ ID NO: 94993 - protein, 401 aa, Streptosporangiaceae bacterium
  misc_feature (1)..(401): tr|A0A3A4AFH2|A0A3A4AFH2_9ACTN Isochorismate synthase O S=Streptosporangiaceae bacterium YIM 75507 OX=2339229 G N=D5H75_25425 PE=4 SV=1
MAVRSVEVPDPGDLLTRLPVPSPYAWIHRGDGLVAWGEAARLTLPPGEDRFERARRWLDRVLGGADIDDRVGLPGSGPVAFGSFTFDPRSAGSVLVVPRVILARRDGRTWCTTVGDAQDAARLVHPLLDPGAVRWDDDADCARHYEQAVAQAVQEIRADKLGKVVLARDLRARAEHPIDARILLNRLSTRYPECYTFSCAGLVGATPELLVRHTGQAVESLVLAGTTRRGATPEEDAALGAALMNSAKDRSEHVYAVESVRAALTPLTRRLDVPEEPELLVLPNVQHLASPVSGELADGSSVLDLVAALHPTAAVCGTPSDVAMEAIRGLEGMDRGRYAGPVGWIDARGDGEWGIALRSAEIDGHDARLFAGCGIMADSSPAAELAEAQAKLRAMQDALEG

SEQ ID NO: 94994 - protein, 406 aa, Streptosporangium nondiastaticum
  misc_feature (1)..(406): tr|A0A2P7PLL7|A0A2P7PLL7_9ACTN Isochorismate synthase O S=Streptosporangium nondiastaticum OX=35764 GN=B7P34_21 970 PE=4 SV=1
MTTAHHVADRPGGSEPGAPVRGDTVGAATSLLDAYEPGRARFFASPTRTLLAHGVRAEVPHGTAPVAQRVAETLAARVRAGDAAPVVVGAIPFDQAAPAALAVPEAVRWAPPLAEDPLVALPAAAPVAARWDIRPVPEPAGYGAAVAEAVRRMRRGDFAKVVLARTLELSSDRDLDLPALLQRLARRDPSGYTFALPAGPGRTLLGASPELLVSRRGGTLVANPLAGSTPRSADLAEDVRRAAALLESEKDLHEHAVVVDAVREALTPYCRSLHVPERPTLVRTAAMWHLSTTVTGEPADPAVSALELASALHPTPAVCGTPTTTARDVIGELEPFDRGFFTGMVGWGDANGDGEWVVTIRCAEAEERTLRLYAGAGVVAQSSPEAETAETGAKFQTFLQAVGVDQ

SEQ ID NO: 94995 - protein, 428 aa, Subtercola vilae
  misc_feature (1)..(428): tr|A0A4T2C703|A0A4T2C703_9MICO Isochorismate synthase O S=Subtercola vilae OX=2056433 GN=D4765_05325 PE=4 SV=1
MLIPMLDSRDPLLWIRKGQGFAGIGTALRLEFSGENRISDAGAAWREIAAAATVVDPLKTPGTGLVAFGAFAFSAQSAEKSVLIVPRVLVGKRDGVHWMTTVHVLHPDQVIPGEAEAGHPEPTRSGTQPEARAEARPTPPMSRPEPTLPPATPLGSEYRISLLPGAAKPDTYRAAVEEAVSRITHGDLEKVVLARDLVGHLPDGSDLRRVITDLALGYPDCWTFAVDGLIGSSPETLVSVSHGTVTARVLAGTISRGRDAEADHDQAVALATSAKDLDEHRFAVASVMSALTPHARTLAASEIPFTLKLPNLWHLASDIEGTLGDGSTSLNLIASLHPTAAVAGTPTKDALRLIERLEPFDRGRYAGPVGWIGADGDGEWAVALRCAQVDADGYITAYAGAGIVSESDPEREFLETRMKFRPMVEAFA

SEQ ID NO: 94996 - protein, 342 aa, Succinatimonas hippei
  misc_feature (1)..(342): tr|E8LJ76|E8LJ76_SUCHY Isochorismate synthase OS=Succin atimonas hippei (strain DSM 22608 / JCM 16073 / KCTC 15 190 / YIT 12066) OX=762983 GN=HMPREF9444_00774 PE=4 SV= 1
MQDNKIHFLSIQKNNNSKETFVIAPFNPDDKPLYLNVCMHTQGDIKHICNFIHKNYSHLNFEKTLNEQTNNKEPLSQEKINSFCKTANEKAYKDYCSAFSKFKQELVKENFAKLVLSRPYFCPLKKDLSHSFLDLCKTYPNAFCYMAKVGSKGIFMGASPEILASVADNELKTMSLAGTMAKSLNNHYEWSSKNIKEQQLVTDFIISRIKPYAKSISAAGPVTHDAGPVVHLLTQITAVLNDGIDKHSAAASLHPTPAVCGLPKNAALKFIVKNEGYKRNYYSGYIGLISPNNLHLFVNLRCMFFNGQFAVLYAGGGLLKSSDLEDEWQETENKLKTLRDLI

SEQ ID NO: 94997 - protein, 320 aa, Sulfurospirillum multivorans
  misc_feature (1)..(320): tr|A0A5B9TUI2|A0A5B9TUI2_SULMU Putative para-aminobenzo ate synthase OS=Sulfurospirillum multivorans OX=66821 G N=SMN_2255 PE=4 SV=1
MNIEFASKLNAFGKARTPFFFVIDYAAKQFEVFALDAVPSGILYQLESQSNASKAFTCKDVSWSKTPPSKEHYFAQCDAVIEAIKAGNTYLLNLTAPTNVEFSGSLETLFYTANAPFKLCYHEHFVCFSPERFVQLKNNQISTYPMKGTIDASIPNAEEMILNDEKEKAEHVMVVDLLRNDLSMVSREVRVEQFRYVETIQAGTKELLHVSSKITGKLDENWHENVGTIIAKLLPAGSISGTPKRSSVEIIERLEGYDRGYFTGIFGVYDGKSLDSAVMIRFLEKTKEGCVFKSGGGITLLSDAQKEYDELCDKVYIPVF

SEQ ID NO: 94998 - protein, 465 aa, Synechococcus sp.
  misc_feature (1)..(465): tr|A0A424HP96|A0A424HP96_9SYNE Isochorismate synthase O S=Synechococcus sp. TMED20 OX=1986597 GN=CBB80_010960 P E=4 SV=1
MTADHRFSTLLDAARSGWEQRSCEDSLLSLALPIEGIDPLPALPHLANTDAFRFLWDCAPGLSLAASGRCQHLELAGLRRFELAQRFCDVTLGRLIDATPATHPQARAKVLLAFSFFEQSDERALPSSVPSVQAVLPRWQLSRQGQRGWLRINGTVSDIADARELAEQLWLKTRELEAHPGGPPLQTSAPIPIPGRLAAKPWQDRYRQALDRALELVNEAELHKLVLAVRQTIDLEEPLDTLPLLQRLRHQQAGSCRFLWQRQTGDAFFGASPERLLCLRGDNLRIDALAGTAGRGDDGSQLLRSDKDRREHELVVETITGRLQQMGLNPWHRPHPQLARHGLLTHLHTPITADAAGRSALALAEELHPTPAVAGLPRREAMAWLRALEPFERGGYAAPIGWIDSAGDAELRVAIRCGHARGHRLDLTAGAGLVRGSIAERELQEVGLKLAVLANQLELRSALWQ

SEQ ID NO: 94999 - protein, 443 aa, Synechocystis sp.
  misc_feature (1)..(443): tr|A0A068MZB1|A0A068MZB1_SYNY4 Isochorismate synthase / Menaquinone-specific isochorismate synthase OS=Synecho cystis sp. (strain PCC 6714) OX=1147 GN=menF PE=4 SV=1
MSPGQVCLWSFTEYLDDVDPLAVFGALDLQEQVHFYGENPQRQETILAFGICQSLRISGKYRFSLAQQFAEDCFQRLVSIGNAQGRSQRPYIFCGFSFFDRTPNPSPFANSFLFLPQIQLVKAPHHCLLSWQISLDSSTNIAELVDFIGQMLSAIRRVNPIRDTLPPSLNGNPPRLTKTEVAQLSTAIASSLGEIDQQRLSKVVLATALDLDYGCQFSTAHCLQRLRQQYGDCHLFSWGNGKGDCFVGASPERLLSLHNQQLITDALAGSAPRAADVQGDRRLGQQLLHNPKELREHQAVLDYLLQRLTALGLTPQASSLKLLKLANIQHLWTQIQAPLPPHIHPLALVEQLHPTPAVAGVPVAIAEDLIRRHETFDRNLYAAPLGWLDSEGNSEFIVGIRSALLSRNRARLYAGAGIVAGSDPLKEVAEIELKLQTLWRSLI

SEQ ID NO: 95000 - protein, 453 aa, Syntrophus aciditrophicus
  misc_feature (1)..(453): tr|Q2LXF2|Q2LXF2_SYNAS Isochorismate synthase MenF OS=S yntrophus aciditrophicus (strain SB) OX=56780 GN=menF P E=3 SV=1
MKSDFLFYPLFREEIDRLSRNSGRKEAGYLLRIENRTELSDPILDIILSCQIPEKFYYSARDDLFELGGLGSALNIEAAGEDEILNGFSWLWDADETIPVFGGFSFDEEPSSPEWEPFGRFRFTLPLVEIRRSPEGVRISVNCVNKKEMSRAQVCRELADALQSLDALTRNFPKEFQPAVADRQLIPDKPQWNRMIKKALRTIREGELKKIVLARKKVITHRDLWNPAQIIASLSRIQENSFTFFYQVDDGIAFLGRSPERLFRMQNGQILTEAIAGTRPRGKTPFDDQRLEAELLSSPKELEEHRFVAGFIEAGMNRLCADVRMESREEILKLQNVQHIVTRFSGRAHSSFSPLSVAAAFHPTPAVGGLPQEEIRSCLRRHEPFRRGWYAAPIGWMNRRNAEFAVGIRSALVNGKALHIFAGAGIVSQSNAHAEWSETEKKMDNFAAIMKER

SEQ ID NO: 95001 - protein, 454 aa, Syntrophus gentianae
  misc_feature (1)..(454): tr|A0A1H8A0L6|A0A1H8A0L6_9DELT Isochorismate synthase M enF OS=Syntrophus gentianae OX=43775 GN=menF PE=3 SV=1
MKSEFFFYPLFQEEIDRLVQNPGRKEARYLVRIEKEMVLTDPILDLILSCQTPGKFYYSAKDDLFELGGLGNALVIEAASGDEVLEGFRRLWNRDETIPVFGGFAFDAEEEIAPEWGPFGRYRFTLPLIEISRSRKGARICVNYINKKRLPREQVLREIADSLQSLDALPRLSPTAGQPALADKALIPEKPQWNRMIKKALRTILEGDLKKIVLARKKVFTQKDRWDPVQIVAALAGISEKSCLFYYQIEDGVAFLGRSPERLFRMHNGTLLADAIAGTRPRGKNPFDDQRLEAELLNSPKELEEHRFVAGFIEARMHQLCTDVKVESREEILKLKNVQHIITRYSGRSQKNFSPLAIAEAFHPTPAVGGFPQEEIRSCLRRYEPFRRGWYAAPIGWMNRRNADFAVGIRSALVSGKTLHIFAGAGIVSQSNPHAEWNETEKKMDNFAAILGEV

SEQ ID NO: 95002 - protein, 454 aa, Syntrophus sp.
  misc_feature (1)..(454): tr|A0A1V5E730|A0A1V5E730_9DELT Isochorismate synthase M enF OS=Syntrophus sp. PtaU1.Bin208 OX=1811713 GN=pchA P E=3 SV=1
MKSELLFYPLFQEEIDRLVQNPGKKEARYLVRIEKVMALADPNLDLILSCRTPEKFYYRAKDDLFELGGLGSALVIEAPSGGEVLEGFRRLWDRDETIPVFGGFAFDAEEEISPEWEPFGRYRFTLPLVEISRSPEGARICVNYINKKKLPREQVLREMADALQSLDAPPRLFPTAGQSTLADKALIPEKPQWNRMIKRALRSILEGDLKKIVLARKKVFTRKDRWDPLQIVAALADISEKSFLFYYQVEDGIAFLGRSPERLFRMQNGTLLADAIAGTRPRGKNPFDDERLEAELLNTQKELEEHRFVAGFIETRMHQLCTDVRVESREEILKLKNVQHIITRYSGRSQQNFSPLAIAEAFHPTPAVGGFPQEEIRSCLRRYEPFRRGWYAAPIGWMNRRNADFAVGIRSALVNGKSLHIFAGAGIVSQSNPHAEWNETEKKMDNFAAILGEV

SEQ ID NO: 95003 - protein, 383 aa, Tannerella forsythia
  misc_feature (1)..(383): tr|G8UI39|G8UI39_TANFA Isochorismate synthase OS=Tanner ella forsythia (strain ATCC 43037 / JCM 10827 / FDC 338 ) OX=203275 GN=BFO_3201 PE=4 SV=1
MNFYKKYLPVGMKEAVTHCLDSFVPFYLYRLPEREGGRLSFGVSLSGRIECKTADFSVPGFVAAPFDSEEEAYFIPGEFECGGDLTDRAVRNLKDAVFSGIRMPCPESGDMDKEAYRTAFEEIMRRIDSGVLEKVVLSRTLIFKRGDSGFSDVFSYWELLRRAYPHAFVFLYFIPGKGVWAGASPELLLDYTKGRVKTMALAGTRPVSFEGELLKPWTQKEIREQGVVRDYIREVLENHCRSVEMSETRTFMAGNICHLCTDFTALTGDGLESLLKALHPTPALGGFPRKEALACIREVEVHERKFYGGYLGPVGKDVARLYVNIRSMELFPGAFRLYVGGGINGDSVFEDEWEETSDKAATLLNVLGIHSVGDKANFNDNAR

SEQ ID NO: 95004 - protein, 397 aa, Tatumella ptyseos
  misc_feature (1)..(397): tr|A0A085JQA1|A0A085JQA1_9GAMM Isochorismate synthase O S=Tatumella ptyseos ATCC 33301 OX=1005995 GN=entC PE=4 SV=1
MVEMEQFENPSVYDFPSLSDRFLFTSRWKSLLTDGCFRRLTSPLTEDGTPGARFSVQAEAALREARLAGIRHPVIAGAIPFDPCQPSELFIPESYRFIDRDHLVRAAKTSPDFAGGEVTGSRLIPEQPAFMAMVSQAIEAMERGEADKVVLSRLQEICSRDAIDMTGLMSQIVRQNPDNYHFHLPLSCGATLLGASPELLLRKEGANFYSCPLAGSAGRSADPAEDTLRGRDLMNSEKDRREHQLVTDDMRRTLQPVSKTLSVPDVPHLLTTSTLWHLATDIRGTLQHTDTSALSLAALLHPTPALSGYPHRQALDLIRTLEPFNRKLFGGMVGWCDDQGNGEWVVTIRCATVKEKTVTLFAGAGIIPASDPYSEWRETGIKLNTMLRAFGLERTER

SEQ ID NO: 95005 - protein, 342 aa, Tenacibaculum jejuense
  misc_feature (1)..(342): tr|A0A238UCK3|A0A238UCK3_9FLAO Isochorismate synthase O S=Tenacibaculum jejuense OX=584609 GN=menF PE=4 SV=1
MSLQDNLPFVVYRKPNSKQVQSFFQKNTTLFFSNEFDEEGFVFAPFDNTKSSILIPLNESEVIHENLDDLSDNSKVVFESDSLKNKADIHIDLVKDAINAIKNNQFKKVVLSRDEEVLLKDFDAITVYQRLLVNYPTAFCYLWFHPKVGLWMGATPETLLDIKDNEFSTMSLAGTQIYNPEKETSWGEKELDEQQLVTDYITEKLREESEYLTVDNLETIKIGNLLHLRTKISGRAKYDIKSVIKVLHPTPAVCGFPKEESKSFILKNENYDRSFYTGFLGELNLTENNTRFSSLYVNLRCMQIKEDKAILYIGGGITKDSDPEKEWEETKVKSLAMKRVLS

SEQ ID NO: 95006 - protein, 345 aa, Tenacibaculum litoreum
  misc_feature (1)..(345): tr|A0A3R9E980|A0A3R9E980_9FLAO Isochorismate synthase O S=Tenacibaculum litoreum OX=321269 GN=EI424_08420 PE=4 SV=1
MSIFLNIKEAFNEELPFVTYRKPNSSIIKGWFQQNNDVITSENYNESGFIFAPFDSREKAILIPRNQSTYIEEETTVGDTQTNNNNHAPDTASEENHIQLVEKGIAAIKNQQLKKVVLSRKEKIELSDFSLIDTFQKLLNNYPTAFVYVWYHPKIGLWLGATPETLVSIKDKNFTTMALAGTQVYNGTTNVTWQPKELEEQQFVTDYITDRLSDISLNITTSGVETIKAGKLLHLRTILNGKLKTNTASLIKSLHPTPAVCGMPLEASKQFILNNENYHRSFYTGFLGELNTDNKESHLFVNLRCMEVSNNTVYIYVGGGITNDSNAIKEWQETVAKTTTMKKVL

SEQ ID NO: 95007 - protein, 354 aa, Tenacibaculum maritimum
  misc_feature (1)..(354): tr|A0A2H1EBA1|A0A2H1EBA1_9FLAO Isochorismate synthase O S=Tenacibaculum maritimum NCIMB 2154 OX=1349785 GN=menF PE=4 SV=1
MNIFKHITTAYQKQLPFVVYRKPSSERIAGFFQKTDELHFANDYTEEGFVFAPFNNTEQSILIPKKKADYIEETIVVNLENTSIKSVDTVTKSTLAAQKKHVDLVHKGIKAIHKNEFKKVVLSRKESISLSNTDFINIYQKLLHTYPLAMVYVWFHPKIGLWLGATPETLLKIKGNTFETMSLAGTQLYKETLDVTWSQKEIDEQQFVTDYIIEKLQEKEIPITASSPTTVQAGSLVHLCTKITGTFHFKNTELINALHPTPAVCGLPKKRAKTFILEQENYHRSFYTGFLGELNLKPNHATIKESDLYVNLRCMQLKNAEAHIFIGGGITKDSSPEKEWQETVSKANVMKKVL

SEQ ID NO: 95008 - protein, 345 aa, Tenacibaculum sp.
  misc_feature (1)..(345): tr|A0A3Q8RTP0|A0A3Q8RTP0_9FLAO Isochorismate synthase O S=Tenacibaculum sp. DSM 106434 OX=2358479 GN=D6T69_1282 0 PE=4 SV=1
MSIFLNIKEAFNKELPFVTCRKPNSSIIKGWFQQNNDLITSENYNESGFIFAPFDSREKAILIPRNQSTYIEEETTVGDTQTNNNDHAPDAASEESHIQLVEKGIAAIKNQQFKKVVLSRKEKIELSDFSLIDTFQKLLNNYPTAFVYVWYHPKIGLWLGATPETLVSIKDKSFTTMALAGTQVYNGTTNVTWQPKELEEQQFVTDYITDRLSDISLNITTSGVETIKAGKLLHLRTILNGKLKTNTASLIKSLHPTPAVCGMPLEASKQFILNNENYHRSFYTGFLGELNTDNKESHLFVNLRCMEVSNNTVYIYVGGGITNDSNAIKEWQETVAKTTTMKKVL

SEQ ID NO: 95009 - protein, 462 aa, Tenuibacillus multivorans
  misc_feature (1)..(462): tr|A0A1H0FRM3|A0A1H0FRM3_9BACI Isochorismate synthase M enF OS=Tenuibacillus multivorans OX=237069 GN=menF PE=3 SV=1
MLQTKQLQIYEQLSMAKEQLNEQQPTQQVSVVEPIDPINPVDYFTAFEHEQTHRMFWKDTTDTTYYVGIGVHKVFQANQDRFATIKNQWKRFLNDIMISDDVKKETGPLLFGGFSFNENIKGEKWANFKPGQMVLPKMMLTVNHDSYYMTYNVQLSQETDLDLLVSELEGWHDKVQETKEYDANTHSLQSLNSLDYGEWEKLINEAVETIKRGDLGKVVLARELNAKFNQDINISVVLKRLELQQSDSYIFIFDQGDETFISATPERLVRVQGRDLLSTCLAGTTGRGQIESEDDLLAWQLLNDEKNLNEHDYVVRMIKDAIEPLSETVDIPEKPVIYPLRALQHLYTPVTATLKSTTSIFDLIERLHPTPALGGEPRDKAIKYIEEEEPFERGWYAAPIGWIDHEGNGEFAVAIRSGLIQHDQATLFAGCGIVADSVPDAEFEETKLKFTPMLDALGGVTR

SEQ ID NO: 95010 - protein, 472 aa, Tepidibacillus decaturensis
  misc_feature (1)..(472): tr|A0A135L5C1|A0A135L5C1_9BACI Isochorismate synthase M enF OS=Tepidibacillus decaturensis OX=1413211 GN=menF P E=3 SV=1
MITTNKNIYPKWIYDGIKNSQQTGRAFIISYVKKIEPIDPLHFFRNGAELFFGQRLFWSDPSGEMSIVGVGNIYVIEAEKEMRFQTVKEKWTKLLDQIILNDESEGSVIGTGPLLLGGFSFDPYKPKSSLWQEFKDGMMFLPAFMLTHLRGDSWLTINLQVAEDDDPEQTAMKLENELNTLLKEKEESLDCEKDQSYKTMIQEVEPESWIHSVRKATHQIQQGRLEKVVLARELQLQATDTILAEDILYRLREQQPASYIFAIENGEKCFIGASPERLVKKEGNQLLTTCLAGTIRRGKTIEQDVELGQQLLHDRKNRYEHDLVVQMIRSAMEEGCSKVVTPSEPILYKLKDVQHLYTPIVGYSDSTSILDMVERLHPTPALGGYPREQAMELIRKEEILDRGWYGAPVGWLDRQGNGEFVVAIRSGMIYHHLASLFAGCGIVEDSIAESEYEETMIKFKPMLTAIGGKINE

SEQ ID NO: 95011 - protein, 394 aa, Teredinibacter turnerae
  misc_feature (1)..(394): tr|C5BUB6|C5BUB6_TERTT Isochorismate synthase DhbC OS=T eredinibacter turnerae (strain ATCC 39867 / T7901) OX=3 77629 GN=dhbC PE=4 SV=1
MSVTFAESRLSAHAIPTASNFTFCSSHRKLHTTGIAENLHLPIFEHNTTQRFTKSLRSAFQRAHANGISNPIVVGAIPFDLTQPCSLFIPVESHFGTTPIVNQFSKRDPIEIVNRRSFPEEARYKQSVKQAIANFQLSDIRKAVLSRVLELDLNTQLPANTLFHSLQHQNPTGYHFSVPLEDGGQLVGVSPELLIRKEAEWITSNPLAGSTRRLRNADDDTAAALALQSSHKDLYEHRLVIEEINRVLQPFCSELDIPAAPSLLNTETMWHLSTLIRGRLSNANISALDIASALHPTPAVCGYPTPLAHKLINLVESFDRGLFAGMVGWQDSDGNGEWAVTIRCGIVRGNQVSLFAGAGIVEDSCPESEWAETQAKLQTMLKALPIQANAEAAQ

SEQ ID NO: 95012 - protein, 418 aa, Tessaracoccus rhinocerotis
  misc_feature (1)..(418): tr|A0A553K5J8|A0A553K5J8_9ACTN Isochorismate synthase O S=Tessaracoccus rhinocerotis OX=1689449 GN=FOJ82_03660 PE=4 SV=1
MILESGSNRLRATTVAIDDPGPLQRFLPLTGPSTAFIRKGEGIITIGEVERFETDYPDAADVWWDEVASYIDHDSELPGAYGTGPLAVGSFTFDPDASEERSVLIVPKVIIGRRAGQFWMTKLTGGRMDYELPDVGEAIVPPTGVTLDDGPVPPAEWGRIVAEVVGLIRADEVSKVVLARKVRARSETPFDARAILNRLLHRYPTTWAYMVDGLVGATPELLIRRQGGLATSRVLAGTISLDPDHTDPLARAADLARSHKDISEHEFAVESIARALEPFCSAMNVPESPSVLPLPNVLHLATDITGVTDPDTSALALAAALHPSAAVCGTPTFLAREVIGELESMDRGRYAGPIGWVDARGDGEWALALRGGQILRDDPREIHLFAGAGVVADSEPEAEIAETNAKLLPMLQALGLSD

SEQ ID NO: 95013 - protein, 418 aa, Tessaracoccus sp.
  misc_feature (1)..(418): tr|A0A3M0G281|A0A3M0G281_9ACTN Isochorismate synthase O S=Tessaracoccus sp. JDX10 OX=2479848 GN=EAX62_13550 PE= 4 SV=1
MSLDFSTKRMRATTVAIPDPGLLQRFLSASGPTSAFIRRGEGFVALGEVARFETDYPDAADVWWAEVADHIDHDSELPGAYGTSPLAVGSFTFDPDRSEERSVLVVPEVVIGTRGGQSWMTTIGPRSRSLELPPSGERLVAPTHLDLLEGSMSERIWMDIVGEVVALIRTGEVDKVVLARDLVVKAGGPLDARWLVNRLVNRYPTCWTYLVDGLVGATPELLIRRQGGLATSRVLAGTVSLDPQNTDSLVKAAELATSSKDVAEHEFAVESVARALEPYCSAMNVPESPSILRLPNVLHLSTDITGVTDPGSSALALAAALHPSAAVCGTPTFAARDVISELESMDRGRYAGPVGWVDSFGDGEWAIALRGGQIKPETPEQIQLFAGCGLVADSDPAAELAETKAKFLPMLQALGLAD

SEQ ID NO: 95014 - protein, 428 aa, Testudinibacter aquarius
  misc_feature (1)..(428): tr|A0A4V2W2G9|A0A4V2W2G9_9PAST Isochorismate synthase M enF OS=Testudinibacter aquarius OX=1524974 GN=menF PE=3 SV=1
MDCWQQIKQQLRQRLNAHDFSAQNSAISQYQLEFTPDSASDDVLAWLKGQCCYPQFFWQARESATQCVALGQVNYFTELAAAQAFLTAYPMQQLQLVGGLTFEGEAHFYLPRLWLEQRAQTWRITLTLSADDQQSAVEAFLQGLSPPLPLKQVQTTLRLETQNYSENEWQALVGEALAQIEQGHFTKVVLAQKKTYRSDTAVNPYDLVAQARVQHADCYYFLWAQTPEQVFLGASPERLYQRDRQRLITEALAGTAVSSDDPQQTEQQQQWLLQDRKNIHENRLVVEDICAKLANFSQHLDIESLTSRKLSYVQHLVRKIAAKLYPDADDSTCLSAIHPSAAVGGLPDRAALNFIATRQNFRREWYAGTLGVMSLANSEFCVAIRSTLLNQDKIMIFTGAGIVAGSVPLLEWQEIERKAAGILLLFPA

SEQ ID NO: 95015 - protein, 260 aa, Tetrasphaera australiensis
  misc_feature (1)..(260): tr|W6K2S2|W6K2S2_9MICO Isochorismate synthase dhbC OS=T etrasphaera australiensis Ben110 OX=1193182 GN=BN11_193 0001 PE=4 SV=1
MGEAVERITSGALDKVVLARSLVARAEAPIDPRFLLRRLADSYDNTWVFAVAGLIGATPEMLVRLDRGLASSRVLAGTIRRTGDDAHDLALSASLARSSKDLEEHEYAVRSVADALGRHCASMNVPESPFVLHLPNVMHLATDVAGAVEDGATSLELAASLHPSAAVCGTPTATADALITELEGLDRGCYAGPVGWMDAAGDGEWGIALRSGQLDPADPCQISIFAGCGIVAGSDPEDEVAESDAKFLPMRDALTAAPTA

SEQ ID NO: 95016 - protein, 164 aa, Thalassiosira pseudonana
  misc_feature (1)..(164): tr|B8C734|B8C734_THAPS Salicylate biosynthesis isochori smate synthase-like protein (Fragment) OS=Thalassiosira pseudonana OX=35128 GN=THAPSDRAFT_263409 PE=4 SV=1
FLGCTPERLFRIKSEDQNRVALAGTRIRGLTPSADAELLRELLSSKKDMLENEITGKFISDALQELEDSGWFFVRRLRHLQHICQIFEGRLSKSANVIDVSRSLLKGLHPTPAVCGDGPSPALDFIRTFETTASFDRGFYAGPFGYIGHDSADIVVAIRSALLT

SEQ ID NO: 95017 - protein, 463 aa, Thalassobacillus cyri
  misc_feature (1)..(463): tr|A0A1H4G5Z4|A0A1H4G5Z4_9BACI Isochorismate synthase M enF OS=Thalassobacillus cyri OX=571932 GN=menF PE=3 SV= 1
MIHTEAATLDEVIDQALNKAVQTNQKQLVSIVEHIKPIDPFVFHAGAAVMNEPRLFWKSADEDVVMAGVGAAIRLSSAKDDRFQNIQDQWKQLMEHAYRFDRHEQKGTGPVAMGGFSFDPRKENTELWSSFGNNQLEIPSYLLTIVENEHYFTINAVIYPDDHKEQLKFQWEEAKSALLQKRNHTFIAPEILERKEIEPDEWKRLVKKATEDIEAGVLDKVVLAREIRLKFDENVDISQVLQHLDDTQTNSYIFAFESEGAQFVGATPERLVKVENQQLLSTCLAGTIPRGGTADEDVKLGQELLEDGKNLEEHQFVVRMIRDAIVACSEEVDIPDRPVLYPLKNLQHLYTPVRAQLKQEHTLLDVVARLHPTPALGGLPQEEALAYIREFEPLDRGWYAGPVGWFDSKQNGEFAVAIRSALVNKNKASLFSGCGIVKDSDPEMEYEETAIKFTPMLAVLGGA

SEQ ID NO: 95018 - protein, 406 aa, Thalassolituus sp.
  misc_feature (1)..(406): tr|A0A558NKC4|A0A558NKC4_9GAMM Isochorismate synthase O S=Thalassolituus sp. C2-1 OX=2597518 GN=FOT50_11555 PE= 4 SV=1
MNNPVSGIEENSSHPVLASGISAHPDVENACFFYASSQGCIQARGIAEAVCQPVGVDAVQRLQFLRSVDSALNRARAYGQKRPLVMGCIPFDRTQPATLYVPRESEFLTEAPVLPVPDLAIRSRVISCDSVPGEQRFRQSVEQAVANFRLSDIRKTVLSRVLNVDLDRPLDAGSVFQRLRAQNPSGYHFRFPLADGSELIGASPELLLRKQGRKIMSNPLAGSARRRADATEDRQVSEQLLRSAKDAYEHKLVIDDIRQVLSPWCEELDIPDAPSLISTPAMWHLSTCIHGQVNDATMNPLKIATELHPTPAVCGSPTAQAYKLIQLIEPYERGPFAGMVGWCDGEGNGEWVVTIRCGRITANRIQIFAGAGIVADSSPESEWAETRAKMQTMLNALDADFSGVTL

SEQ ID NO: 95019 - protein, 609 aa, Thermaerobacter sp.
  misc_feature (1)..(609): tr|A0A371Z9A2|A0A371Z9A2_9FIRM Isochorismate synthase O S=Thermaerobacter sp. PB12/4term OX=2293838 GN=DYI95_04 435 PE=4 SV=1
MTSLAREVPHLASLTGPVSRDLDRLHARARDQARRGRRPSVVSFTVAAEDLDPIALFEGAAILTRERALWSAPGGTMAMVALGAAAVLEAGPGVAAESEAAGAGPAGPLAAIAPALASAWQALCEGALIDAPHGVWGTGPVVVGGFAFDPQEPADLLWAGFPAARFVLPELLVTRTGGETWLTFNRVVVPGVGTEAGTAAGTSAADGAGEGAGWIFPGGIRLHVPAAATTAAGERGRRWLSLLAVASTAGRRPGSRGTDPREPAGAPGAGGPGKAAAAAGGPAGSRPAGAGGLGAEPGAPGPRCEAGGRGGPGSSARPSGAGGAPSLIGARAVPGREAWEAMVRAALDAIGRGELAKVVLARRLHLRAGAAFDPGAALRRLQAGYPECFVFAVARDRTVFLGATPERLVRLRDRRVETAAVAGSTARGATPEADAALARELLASPKEREEHALVVRMLRDTLGPVCRVLDVPAEPRLLQLQNVQHLYTPITGVVDGATVPELVARLHPTPALGGWPRERALEFIRRWEGRTRGWYAAPLGWFDHRGEGEMAVAIRSGVVRGTEAWLFAGCGVVAGSDPGREWQETALKLQPLAAALGVEPGATEVDHGG

SEQ ID NO: 95020 - protein, 612 aa, Thermaerobacter subterraneus
  misc_feature (1)..(612): tr|K6Q379|K6Q379_9FIRM Isochorismate synthase family pr otein OS=Thermaerobacter subterraneus DSM 13965 OX=8679 03 GN=ThesuDRAFT_01241 PE=4 SV=1
MTPLAREVPRLASLTGPVSRDLDRLHARARDQARRGRRPAVVSFTVAAEDLDPIALWEGAAILTHERALWSAPGGTMAMVALGAAAVLEAGPGPDAAAGPEAAGAGPAAPLAAIAPALASAWQALCEGALIDAPHGVWGTGPVVVGGFAFDPQEAADSLWAGFPAARFVLPELLVTRTGGGTWLTFNRVVVPGVVTAAERGAGTPAAAGAGGEGAGWVFPGGIRLRVPAAATTAAGERGRRWLSLLAVASTAGRRPGSGGTDPRGPAGAPGPGGPGKAEAGPGGRAGLQLAGAAGLGAAPGAPGWPGSAGGREGSGSSARPHGAGGFPSLLGARAVPGRDEWEAMLGAALDAIGRGELAKVVLARRLHLRAAAAFDPGTALRRLQAGYPECFIFAVARDRTVFLGATPERLVRLRDRRVETAAVAGSTARGATPEADAALARELLASPKEREEHALVVRMLRDTLGPVCRVLDVPAEPRLLQLRNVQHLYTPITGVVDGATVPELVARLHPTPALGGWPRERALAFIRRWEGGSRGWYAAPLGWFDHRGEGEMAVAIRSGVVRGPEAWLFAGCGVVAGSDPGREWQETALKLQPLAAALGVEPGAPEVDHGG

SEQ ID NO: 95021 - protein, 393 aa, Thermobifida cellulosilytica
  misc_feature (1)..(393): tr|A0A147KK72|A0A147KK72_9ACTN Isochorismate synthase O S=Thermobifida cellulosilytica TB100 OX=665004 GN=AC529 _05695 PE=4 SV=1
MPRQRVAAPAPTVTELVAAYQPRDFLLTSASGTLLGSGALATVTGIDELADVLSRVGTDTGQAAVAVGALPFDRDAPAHLVVPETVRRGPAPEPAAAPAPRRSPLPGAWKAVPVPDPADHATAVKRAITLMTDPVAPELRKVVLARCLKLTGTCAADVAAVVANLVRADPVGFTFAADLPSRDAAPRTLVGASPELLVAKHGRSVVSHPLAGSAPRHPDPVQDREQAAALLSSAKERAEHAVVVEAVAEALRPYCRRLDVPEEPWTVTTATMWHLATRITGELRDPHTPSSLLARALHPTPAVCGSPTDRAYAAIAEIEPFDRGFYTGAVGYTDTAGDGEWVVTIRCADIHGSTVDLFAGGGIMPDSDPEAELAETTAKFRTLLRALGVDQTR

SEQ ID NO: 95022 - protein, 393 aa, Thermobifida halotolerans
  misc_feature (1)..(393): tr|A0A399G6X9|A0A399G6X9_9ACTN Isochorismate synthase O S=Thermobifida halotolerans OX=483545 GN=NI17_00805 PE= 4 SV=1
MPRQRVVDPAAAPTELLDSYRPRDFLFCSASGALRCRGALATATGADDLAEALRGVETDNGRAPLAVGALPFDRDAPVHLVVPETVQHGPSTAHAAAPVPARRPLPGTWTATPIPAPADHTAAVERAVKLMADGGGAELRKVVLARCLRLTGQREVDVATVLANLAWADPTAFTFAADLPGRDARPRTLVGASPELLVAKRGRSVLSNPLAGSAPRHPDPARDRERAAALLASPKERHEHAVVVEAVVEALRPHCRRLDAPREPRPVTTATMWHLSTRVTGELRDPHTPSHVLARALHPTPAVCGHPTDRAYAVITEIEPFDRGFYTGAVGYTDAAGDGEWAVAIRCADTCGTTIDLFAGGGIMPDSEPEAELAETSAKLRTLLLALGVDQPR

SEQ ID NO: 95023 - protein, 457 aa, Thermolongibacillus altinsuensis
  misc_feature (1)..(457): tr|A0A4R1QDN2|A0A4R1QDN2_9BACI Isochorismate synthase M enF OS=Thermolongibacillus altinsuensis OX=575256 GN=me nF PE=3 SV=1
MVTLYQNKVIDRLRDALTKKMNIVSVSMKVDEVDPLSFFEAGEKFFLGQRFYWSDCTNEYVFVGLGRTYVIQSDDQSKHRFIEIERKWKKILEGALIEREQDVLGTGPILFGGFAFDPLKRKTEKWINFPSARFILPSILLSKRNNETWLTVNVVDQSLEQLEEIIIHLFNGQKKQNNKDVYCLLKKEIEREKWIQAVKDVTSEIHDGKIQKVVLARELELMFNEQIDSARVLAALREQQPMSYIFAFENGSSCFLGASPEQLVKKEENVCETVCLAGSIKRGKTLKEDEQLGDWLLHDEKNRQEHQLVVDMICNAMNEVCDHVVVPQAPTLLKMRHIQHLYTPVKGYSKENVSILSLVERLHPTPALGGFPQEEAVRKIREIEPLDRGWYAAPIGWMDASGNGEFAVAIRSALIHENEAHLFAGCGIVAHSDAYSEYEETNVKFKPMLFALGGMDE

SEQ ID NO: 95024 - protein, 479 aa, Thermomicrobiales bacterium
  misc_feature (1)..(479): tr|A0A524J1N0|A0A524J1N0_9CHLR Isochorismate synthase O S=Thermomicrobiales bacterium OX=2482790 GN=E4H24_03925 PE=4 SV=1
MTVTDQRSRRVARRQAGPGRLRSTSREVDPIDPIAVFAVASARGLEAALWLQPAADRSIVGVGRAWAVEEGGGDRFEASAHAWRSLLADGLVSSERRGPTEGGPILLGGLGFTGRTPEADDPWAAFGSASLVLPSLTVRRDGPASTLAIATTMGLGSDADPGELEGLWDALAGDADADADRASAPDVTGHPATSTTWPARRSVAVERPDRAEWDRTVGMFAGAVGRGRIDKVVLARRVTYRAPGDLDVIAALRHLAASAPESTTFAFVRDGTTFLGATPERLVQTRGRSFETVAIAGSAPRGSDPAEDARLARLLLASEKEREEHAVVVDTLRAGLSPIVETLQVADSPAILPLRHVQHLVTPITGTLRDEAGLLSLGGRLHPTPAVGGAPRELALELIADQEGFDRGWYAGPIGWLGADGDGELMVALRCGLVTGPEAILFAGCGIVADSDPAREWEESRLKLRTMTTALGGLAVGDR

SEQ ID NO: 95025 - protein, 461 aa, Thermomicrobium roseum
  misc_feature (1)..(461): tr|B9L398|B9L398_THERP Salicylate biosynthesis isochori smate synthase (Isochorismate mutase) OS=Thermomicrobiu m roseum (strain ATCC 27502 / DSM 5159 / P-2) OX=309801 GN=trd_A0262 PE=4 SV=1
MSCRVLDAPQATLQELWPLAERQARAHDRPVILSCAEHCEPVDPIALFARAASHLPRVLWLVPEREEALVGLAGQRLPLQSVTSPSLPLPARLAAAWRALAQDALAEGPLPPLAVAGLAFDPADERPDPWWQPFGQGQLLLPRLLYRQQGALACRSVQAAVFPGEREPRALLTWPTSSLPTPSAAPRSVVQHELVRPDDWRRMIQHALAAIAAGDLRKVVLARARELVAADPFPLEQALRELAARYPSCTVFAIGIGETVFLGASPERLARVAHGTVATVALAGSRPRASSPEQDHRAAEELRRSDKDRHEHALVVEAIRSALAPLCTSLSIPEEPVVVSMANVHHLATPISGILHDGASVLDVVARLHPTPAVGGTPREAALAFIRQREPVPRGWYAGALGWIEASGDGEIVVGLRSGLVRSQQARLYAGCGIVADSDSVAEWAEAEAKFRPMLEALAGG

SEQ ID NO: 95026 - protein, 457 aa, Thermosynechococcus elongatus
  misc_feature (1)..(457): tr|A0A3B7MA80|A0A3B7MA80_9CYAN Isochorismate synthase O S=Thermosynechococcus elongatus PKUAC-SCTE542 OX=201610 1 GN=D3A95_03465 PE=4 SV=1
MPVSLPLTFDLSSESEFYTQVSTGIQAAQQANCQFLSLGIPLPTVDPLMLLAGLMQVSGESEHFYLEQAGEIVAACGAVATSSVQGSQRFSDLQHFSERILNRVWAIAPAEPRIFCQFSFWDDAANRAFLPRWQVIQRRDQVCLTLSCALETSTPHRLWQDWQLLQRALAHLVADPPPCSPPRAIALPPLTEQYGQFITSVKRALQLLEEGDLEKLVLAAALTLEQPQGFNWLGTLQNLRQQYANCYIFSVGQKRQQVFLGASPERLVKIGDGVLCADALAGSRPRGQTQQEDQRLRNGLYHSPKERYEHQVIVEFLCQTLQQLGMSCEVPTKPRILELSHIQHLQTLIQAPLPQPIHILKVVAALHPTPAVAGYPASRAQDWLRQLELFDRNGYAAPLGWVTPTGEGEFIVGIRSAHLQGTHAHLFAGAGIVKGSQPEREWQEILWKFQTMISALA

SEQ ID NO: 95027 - protein, 458 aa, Thermosynechococcus sp.
  misc_feature (1)..(458): tr|A0A5C2M716|A0A5C2M716_9CYAN Isochorismate synthase O S=Thermosynechococcus sp. CL-1 OX=2583530 GN=FFX45_0222 5 PE=4 SV=1
MPVSLPLTFDLSSESEFYTQVSAGMQAAQQANCQFLSLGISLPTVDPLILLAGLMQVSGESEHFYLEQAGEIVAACGAVATRSVQGHQRFVELQRFSEQTLSRVWAIAPAEPRLFCQFSFWDHLGSNWGFLPRWQVIQRLDQVWLTLSCALETSTPHRLWQDWQLVQRALTHILADPPPCPPPLAIALPPLTEQYGQFITSVQQALKLLEEGDLEKLVLAAALTLEQPQGFNWLGTLQNLRQQYANCYIFSVGQERQQVFLGASPERLVKIADGVLCADALAGSRPRGQTQQEDQSLRNGLYHSPKERYEHQVIVEFLCQTLQQLGMTCEVPTKPRILELSHIQHLQTLIQAPLPQPIHILQGVAALHPTPAVAGYPASRAQYWLRQLEPFDRSGYAAPLGWVTPTGEGEFIVGIRSAHLQGNSAHLFAGAGIVKGSHPEREWQEILWKFQTMISALA

SEQ ID NO: 95028 - protein, 479 aa, Thioalkalivibrio nitratireducens
  misc_feature (1)..(479): tr|L0DUQ2|L0DUQ2_THIND Isochorismate synthase MenF OS=T hioalkalivibrio nitratireducens (strain DSM 14787 / UNI QEM 213 / ALEN2) OX=1255043 GN=menF [H] PE=3 SV=1
MRDPSAHGEGAVTLRAETPDRSGVGTPHPPAQHFEHEMAVARLLRRITHWPFRKGQLLHLSERLPALDLLAWLQANPQNARSFWQNRERTISVAGLGAAVELTAQSEQEVGDLLERSYSILGDRDTVFLGGLSFDGRSGRGEWSAFPGARLVLPAIACCQRNGEYRLSVHLLADSRREFIRRKTQLITALCRLRFRGRARPDAPRPRVSSRIDDVDFAGCRRRIQAVLREIAAGELHKAVLARRVELALTSPVAVFEVLARWREVNPGSFCFAMERGQDLFMGCSPERLYRRHRREFQTESLAGTVRLGRTRDEDVALMARLHRDPKLVQEHDLVTRFVRRQIEPWVTDAQSPEQAGVFKLDRIQHRYLPIRATLKPGVLDHPLLDTLHPTPAVCGFPRGAAQALIEREETAQRGWYSGAVGIVSPQESEFAVAIRSVLVNRERILCYSGVGIVAGSDPEEEWTELEAKIESFLSVLEC

SEQ ID NO: 95029 - protein, 462 aa, Thiocapsa marina
  misc_feature (1)..(462): tr|F9U6L7|F9U6L7_9GAMM Isochorismate synthase OS=Thioca psa marina 5811 OX=768671 GN=ThimaDRAFT_0569 PE=4 SV=1
MLAPLKTLEQILARLAETIDSLPLTRSEGFVSLVLELPQALTIAPEIPGPQFQFTHNHRGEVRAGYGIAGEWTAQGEARLQTLRTGAKRMSAHWEHLDPDETGFSGFAMLGFASSPVTDAPSEPDTLPNALLWLPELALSSRAGQAAVILSTALPIAREEVFARWKTRLEQVIPRLNQPALDPLTPARLDQGPTEPDPARWQDLVLSALEQIEQAHLEKVVVCRRLRLEGHRRFDLTRLNAALAYLFPSCQVVTIRRHATSFVAATPERLFTQQRDRIEVDAIAGTVCRAASADRDAELTSALRTCHKNLHEHMVVVDAVTDALGHCSRHVEPPDGPRVMQLNNAQHLWSLVRADLDPGMDVFQLAELLHPTPATNGHPCESARAWLRRCEPIRRGWYTGAAGIIEPDLTGELWVLLRCAEIHENTADLYAGAGIVAGSDPDSEWQETEHKLAAMSTALQFA

SEQ ID NO: 95030 - protein, 475 aa, Thiocystis violascens
  misc_feature (1)..(475): tr|I3YDG5|I3YDG5_THIV6 Isochorismate synthase family pr otein OS=Thiocystis violascens (strain ATCC 17096 / DSM 198 / 6111) OX=765911 GN=Thivi_3156 PE=4 SV=1
MPRPTTSCLHDPVMLAPLKVLEQLKARLHETIGTLPLGQPGGYASLILELPHGLGIAPDLAGPQFHFAHNHRGDLRAGYGIAGEWRARGPDRLRILRAAAKGVAANWQHMDPDETGFLGFGMLGFAASPNESPNAGLAELPNAIFWLPELALCSHDGQAALILTTALPMGIDSLLTRWQNQLDQIVPLLDLPALDPLTPAHLDRGLSTPDQEDWRELVFAALDEIDQERLRKVVLCRRLRLTGQRRFDLTRLNAALTYLFPSCQVVSIRRHRTSFVAATPERLFTQRRDRIEADAIAGTACRAEDAERDAQITRGLRTCEKNLREHQVVVEAVTEALSQCSRSLEPPDGPRILQLNNVQHLRSIVRGELHPDVDVFRLAELLHPTPATNGQPRQEARDWLDRSEPLERGWYTGAAGIVEPDLTGELWVLLRCARISERIADLYAGAGIVAGSDPMSEWEETEHKLAAMSTALQFA

SEQ ID NO: 95031 - protein, 458 aa, Thiolapillus brandeum
  misc_feature (1)..(458): tr|W0TN43|W0TN43_9GAMM Isochorismate synthase OS=Thiola pillus brandeum OX=1076588 GN=TBH_C0631 PE=4 SV=1
MARQADKLQPVPVWLGRLRMELRQLAMPVLMSSRRGLLSVSFEVPLTPLDAPPADAQVWQFWQRPESEHCLLGLGLAHRETASGSRRFHHLDAVWQGLRGGWTRISQGHARPRARAFLGFAFDPGFQPDDAWEGFENALIQIPRLLVEWHHGCCVISFNCHLDQAGKPEQLFSRWMDDLDLLLKHTETAEKSVSSCLIREQPSAGSWQRQVADAVNAAERGDLDKVVLSRSLKLRFNRPVEHRRLLSGLARRYPGCNILSVSFGGDVLLAATPERLLHTSAQRVHCDALAGTLPVDARNRDADMEAHEHAPVVSAIRNALDPLCKELSVDECPGRLNLNNLAHLYTAIRGELRPGIRAMQILDRLHPTPAVGGMPRKQALEWMGQDERWQRGWYTGGFGWLGDNNQADLSVLLRCARIHGNRASLYAGAGITRVSDPQRELRETEMKFEPMLRALTEC

SEQ ID NO: 95032 - protein, 474 aa, Thiorhodococcus drewsii
  misc_feature (1)..(474): tr|G2DZU1|G2DZU1_9GAMM Isochorismate synthase OS=Thiorh odococcus drewsii AZ1 OX=765913 GN=ThidrDRAFT_1554 PE=4 SV=1
MAGPPLSRTHRPLMLQPLKVLEQLKARLREAVALLPLDRNAGYASIILELPHGLTHAPDIAGPRFLFAHSHRGDLRAGYGIAGEWRAEGPKRLDILRAKARAVAADWQHFDPDETGFTGFGMLGLAASPNPSQSKESDLPNAIFWLPELALTSHAGQAALVLTTPLPSTLDALLTRWEPLLDRVVPLLDVPAQDPLTQAHLDPGDSTPDQDDWRELVLTALDEIDQERFEKVVLWRRLRLQGHRRFDLTRLNAALAYLFPSCQVVNIRLHGASFVAATPERLFTQCRDRVEADALAGTACRAEDADLDAEITRDLQHCEKNLREQRVVADAVSEALTHCCSHVEPPDGPRIMQLNNAQHLWSLIRGHLKPGVDVFRLTDLLHPTPATNGQPRQQAHDWLREHEPLERGWYTGTAGIVEPDLTGELWVLLRCARIDDRVADLFAGAGIVAGSDPMAEWQETGHKLAAMSTALQFA

SEQ ID NO: 95033 - protein, 463 aa, Thiorhodospira sibirica
  misc_feature (1)..(463): tr|G4E2I8|G4E2I8_9GAMM Isochorismate synthase OS=Thiorh odospira sibirica ATCC 700588 OX=765914 GN=ThisiDRAFT_0 517 PE=4 SV=1
MYNPSLPDKHPLMQRLDRNHLADLPTDARLLTLTLSLPSCRIHGLPALDGDWFYWACPQARQYLLGLGQAYMAQVTGCGRLEALSQAFTALQQSWHHRDLDHTGLSPVAFTGFAFDGRDPMAQGWEGLPNAMLVVPELLLHQQGDQTCISLSCALPQAHPEQVLQRWSQRLQTLLTALAMPPRNTLATLAVRVEQHPPLDAWPDLVAKALAAIAAQQLEKVVLARSLRVHTTPQIDPTELMAVLDRLYPDCRHFAIRAADLVFAAATPERLLTRTGERICADALAGSTPVSLDADTDQCLRDELHHSPKNRHEHQLVVRGMQAALAPLCHEVRYAEPPDILRLRHVQHLWTEIHATPKDGVNLFDLAARLHPTAAVSGTPSKTAQNWIETHEGLARGWYTGGGGFIHANGDGEIAVLLRCARLRGQEAALYAGAGIVAGSDTQAECHEIDVKLKAILEALGLV

SEQ ID NO: 95034 - protein, 400 aa, Thiotrichales bacterium
  misc_feature (1)..(400): tr|A0A1H6FC48|A0A1H6FC48_9GAMM Menaquinone-specific iso chorismate synthase OS=Thiotrichales bacterium HS_08 OX =1899563 GN=menF PE=4 SV=1
MKGGGTLSVDWLQALLATSVQQQCTVAVWRLPEQQNISVLVSFSGVQTVVDFQKSATLSGFAVTPFYTSGNEIQLVKPDMLFDSNFGDWRIQPHADRNKVNAFLRLLKKQLSSSTDNMSWFVHTSANQQYQADKTAYTKLVAKALGKIQQKTFDKVVLARQKIMTLSASVHPADLFSACLKLYRAGMVSLISAPNLGTWVGASPERLISRDKQGTIRTTALAATQPVPEHVSTSARQSWDNINWSHKARKEQAFVSRFIRDCYQRIGLKNLVEHGPGTVAAYDMLHLQTDFMIEHETTDYLPFLLLAQLHPTPAVCGMDRTAARQFILAEERFSRQLYSGYLGPVNLGGETHLFVNLRCMQFFKQTAALYAGAGITMDSVPEKEWQETELKMQTLSELLR

SEQ ID NO: 95035 - protein, 439 aa, Tolumonas auensis
  misc_feature (1)..(439): tr|C4L9G4|C4L9G4_TOLAT Isochorismate synthase MenF OS=T olumonas auensis (strain DSM 9187 / TA4) OX=595494 GN=m enF PE=3 SV=1
MLAQIRLLEQLNALAKTDQHGFVRLRAPVDVTSLIGWLKAQPLYPRIYWHARERDREFAVLGAIRELTDPAQLAELTGQQRPNAGSYPRYYGGLAFDYQQPVTGEWQDFGQCRFVLPRIELIRQGNQTELVCNLWFEGANAEQEMAAARTALQQLQPEKTLRKYLPTQRERQDTPDKPRWMQWLSQVLQPEALKTIPKVVLSRRSTLTFNEPLEPWSLLASWQCAAPACFHIGFQFSPDSCFIASSPERLYRRQDRQLLSEALAGSTPRTGDPEQDAELATLLLQDGKNRLENRFVHTDILTRLDGLAETAVVSDAHILPLQHIQHIKREIEASLRPDTTDWQLLKSIHPTPAVGGSPRRKALAQIRALEQHQRGWYAGACGFISEDVSEFTVAIRSGLWHDQQLHLYTGAGILTGSDADTEWQELDTKLGSMLGAWHD

SEQ ID NO: 95036 - protein, 364 aa, Tolumonas sp.
  misc_feature (1)..(364): tr|A0A5C7QZ27|A0A5C7QZ27_9GAMM Isochorismate synthase O S=Tolumonas sp. OX=1978237 GN=E6Q86_03175 PE=4 SV=1
MSPKEKLYGDIIDSLANRNISFALYRAPEDKNVHFLAQTTGHIRTFYDLKELNGEQGFVIAPFHSGSNKPIVLIQPDCLELEKLAATPCEPLNELDDAFEENNRDALKEEYTRKFHAFVQPLQEKEFDKLVLSRSTTLRREATFSPAAAFFRASKRYTHSYVYLCYTPQTGMWLGSTPEIILSGEQGSWSTTALAGTQSLHQGELPINWDSKNKKEQQLVASYIRRQLQTLHIQPTEKGPYAVRAGELAHLKTDFHFALRETNSLGDMLKLLHPTPAVCGLPKEKAYRFILSQEGYDRSYYSGFIGNLNPSGRTDLYVNLRCMHIGKEQLTLYAGGELLPTSKLADEWNETEKKLQTMLAITNN

SEQ ID NO: 95037 - protein, 434 aa, Tomitella sp.
  misc_feature (1)..(434): tr|A0A516X8P7|A0A516X8P7_9ACTN Isochorismate synthase O S=Tomitella sp. HY188 OX=2597660 GN=FO059_15110 PE=4 SV =1
MTSPAATDPDAGSPAGSGSPTGTGAGPLPDPAALLDEYTPGDFYFSTDRYTMLGAGGVHVGAAVPSAASGDAVRAALREAGPTGGRPARVVGAVPFDTSRPARLAIPERLRIIGGGDSGGPAEHGHEGRGQAERSGVGARGELEAFSVTAVPSPEDHIAAVDEALSTMHRSPELHKLVLARTLHLRPGEAVDPLRVLRILARRHPEAYTFAAEIPGGPEGGPRALVGASPELLAARRGDAVRSCPLAGSAARSADPAEDRRRAEALQASAKDQVEHAIVVDAIAESLRPLCRTLEVPRRPELVATPTMWHLATPIAGTVADAAITALDLALALHPTPAICGAPAAAAHAEIGRIEGFDRGFYSGFVGWCDARGDGEWAIAIRCAEVDAAGARLFAGGGIVAGSDPAAELAETSAKFRTMVDAIDEAVRAAPVRG

SEQ ID NO: 95038 - protein, 391 aa, Trabulsiella guamensis
  misc_feature (1)..(391): tr|A0A085A0T5|A0A085A0T5_9ENTR Isochorismate synthase O S=Trabulsiella guamensis ATCC 49490 OX=1005994 GN=entC PE=4 SV=1
METSMAEDVLDETTTLSSDGFLFMSPYRSFTASGCFRRITTPPEDGGNLNSTFQRSVTTAFSDAKAAGIRKPVMVGAIPFDTTQPSALYIPESWQTFSRTHKQHSARYAAALPEINVTARQDIPAQETFMTMVVHAAERTATPELDKVVLSRLIDISTDTPLNSGALLERLIAQNPASYNFHIPLPDGGVLLGASPELLLRKEGEHYSSLPLAGSARRQPDDMLDREAGNKLLASEKDRHEHDLVTQAMKAVLAPRSKMLAMPDSPQLMTTPTLWHLATPIEGVAREEENALSLACLLHPTPALSGFPHQTAKRLIAELEPFERELFGGIVGWCDDEGNGEWVVTIRCARVRENRVRLFAGAGIVPASSPLSEWRETGVKLTTMLNVFGLH

SEQ ID NO: 95039 - protein, 430 aa, Trabulsiella odontotermitis
  misc_feature (1)..(430): tr|A0A0L0GUZ9|A0A0L0GUZ9_9ENTR Isochorismate synthase M enF OS=Trabulsiella odontotermitis OX=379893 GN=menF PE =3 SV=1
MHSISAALENLQAALSADFPDSPGVRVVDVAFPLNDAFDPLSWLCSQRCWPQFYWQQRNGDDEIAALGAVKSFLSLADASHFLQTPALPDDLRICGMNAFNPQQGALFLPRLEWRRNAGNAELRLVLWSDRSLREDALQAREFFASLKEGKLLPPLQVTLQAERHHPDHPHWIQLVSEAIATIASGALDKVVLARATDLVFTDALNAGAIMAASRRLNLRCYHFYQAFDAGHAFLGSSPERLWRRRGKLLRTEALAGTVASHPDDAQAQKLADWLMKDDKNQRENMLVVEDICQRLQTAVQTLEVLPPQVVTLRKVQHLRRCIWTELADADDERCLHLLQPTAAVAGLPRTPARAWIEQHEPFTREWYAGSAGYLSRQQSEFCVALRSAKIDGKTLRLYAGAGIVSGSDPEQEWQEIDNKAAGLRTLLFE

SEQ ID NO: 95040 - protein, 471 aa, Trichormus variabilis
  misc_feature (1)..(471): tr|Q3M9U0|Q3M9U0_TRIV2 Isochorismate synthase OS=Tricho rmus variabilis (strain ATCC 29413 / PCC 7937) OX=24029 2 GN=Ava_2632 PE=4 SV=1
MTVSPCRRSLFVEQKDLYQFLLAVQQNCLKNHCRQIVSVSLEIDWVDPLAVFAKLAQANAINFYFENKVKGEAIAGIDAVTKLQIDGKERFIQSEYFIKSNLENIVNFGNTSQPFAGPHFFCYFSFFAEKNKLDYPFPAATVFLPRWQISVKNQCCTLVMNAVINSSVNIQILLQNLLDKIELINSLEPYSSNLDYFPTNLSKKLVTNGERYKKSVASALEKIQSKELSKVVLADILDVSSNQHFNLLHSLNNLRKTHPNCYIFSTSNGKGQNFIGASPERLITIHNQQLITDALAGSAPRGKTPAEDAANANRLLNSEKERHEHLLVMDFITQRLTQLGLLPQVLPPRLRQLSNIQHLWTPINAIVPANVHPLKIIAQLHPTPAVAGAARDIACEEIRRYETFERGLYAAPLGWIDSQGNCEFIVGIRSALIDGDRARLYAGAGIVAGSDPDREFAEVQLKLQALLKALV

SEQ ID NO: 95041 - protein, 434 aa, Tropheryma whipplei
  misc_feature (1)..(434): tr|Q83H14|Q83H14_TROWT Isochorismate synthase OS=Trophe ryma whipplei (strain Twist) OX=203267 GN=menF PE=4 SV= 1
MNRVTTRVTMLPIEVEITRIGNMDRSDFKRQYIRKVLSWDFVYCTHSTMMRTQGRVLKINLDSYSAEARFEAAESLINEIHTKIQYTSENLNPIGLIVLFGFTFSPYSARPSFLAIPEQMFFWSDGVAWKIDATICHNLSEPSRIFKWPKSISFKMGDFRQEDYKHAITNVVNKLLNADISKVVLARDIIAEIHDDFDPEAHAIDLDEAIQRLMNTANGTVFVFDGLFGASPEVLLRTDGNSGFEVSILAGSMSANHPKHVIHNCAASPPYKALDETYLDEKLRLEHSFALNPTLERLSTLMNTAPTVNSYKIRRFTHITHVASFISGTFKPNISPLRALSHIHPTGAIAGEPRERALEIIKEIEPFDRELYGGAIGWIGQDSSCEFTLPIRCAQLNRGHIKAFAGCGIVKSSIPQKELEESTLKFKTIIDAIS

SEQ ID NO: 95042 - protein, 417 aa, Trueperella bernardiae
  misc_feature (1)..(417): tr|A0A0W1KKU5|A0A0W1KKU5_9ACTO Isochorismate synthase D hbC OS=Trueperella bernardiae OX=59561 GN=dhbC PE=4 SV= 1
MFTIPHLRAQTTALPTPPVLTELMPASAGALAWLKDGRGFIAAGEAARYDHGRDGAGTRFALASQWWIEVVQAAEIRDTLLRPGTGLVSMGSFAFAADSPVGSALIVPQVVVGFDGEVGWLTFIGPADLDVFDTLTPDALALVDAALRPSSGSYASHGKVRADDVDVAVYRDKVTRIQERIAAGSVRKVVLARELQVEAEREIDERYVVARLAAAYPQCWTFAVDGLVGATPELLAAGTGREVEVKVLAGTLPRGEADVQALLDSAKDACEHRLAVESVVEKLEKLGRVEVAPTEVLTLPNVLHLATQVRAELEIEATSLQVAGALHPTAALGGTPTLRALDTIAEIEGIDRDRYGAPVGWMDTRGGEWCIALRCARIEGRQAIAWAGGGIMADSDPDAEYAETEAKLAPVLGALGG

SEQ ID NO: 95043 - protein, 420 aa, Trueperella bialowiezensis
  misc_feature (1)..(420): tr|A0A3S4UZM3|A0A3S4UZM3_9ACTO Isochorismate synthase d hbC OS=Trueperella bialowiezensis OX=312285 GN=dhbC PE= 4 SV=1
MFEIPHLRAQTTPLPDGYEPELAALFLDGEIAWIKDGTGFVAAGEAARYEAPATPSRFALASQWWSRVLADAEIRDELRLPGTGLISVGSFAFNHASPAGSVLIIPQVVVGWDGQTGWLTLIGPTDRDVFDTLSPAARELVDDTLRRRRPPAGEVARVSCAPASTAERADHRSGVVAIQQRIGAGEADKVVLARRLELEASEPIDQRSVVRALAAANPESWTFAVDSLVGATPELLAATKGREVHVRVLAGTAPRERDAKAWLISSTKNTAEHHMSVESVVCALEKLGAVEAGSPFVLELPTVLHLATDIRAHLDLDATSLEVAGALHPTAALGGTPTHAALKIIDEVEGADRGRYGAPVGWMGSHGGEWCVALRCAQIDGTRARAWAGGGILADSDPDTEWAETEAKFAPILDAFNQAE

SEQ ID NO: 95044 - protein, 422 aa, Trueperella pyogenes
  misc_feature (1)..(422): tr|A0A3Q9GJN2|A0A3Q9GJN2_9ACTO Isochorismate synthase O S=Trueperella pyogenes OX=1661 GN=EBQ10_09645 PE=4 SV=1
MFTIPHLRAQTTPLPTHPVLSELLRTPVRAMAWMKDGKGFVAAGEAARYDHGPDTANTRFALASQWWTELTTGAEIRDELKRPGTGLVCMGSFSFSPTCPAGSTLIVPQVVVGFDGEAAWLTLIGPVDRDVFDTLTDDARALVDAALRPSPVDYPSHGAVRVDAVDVAAYRDKVALIQERINAGGVRKVVLARELSLQAVSPIDERYVIERLARAYPQCWTFAVDGLVGATPELLAATLEREVAVTVLAGTLPRTADADPQELQASPKDADEHRLAVESVVSELSKIARIEVGPTHVLTLPNVLHLATDIRATLDFMATPLQVAGALHPTAALGGTPRLRALEAIAEVEGIDRDRYGAPVGWMDTRGGEWCIALRCARIDGTHATAWAGGGIMADSLADNEYAETEAKFAPILGALGVADAS

SEQ ID NO: 95045 - protein, 366 aa, Tsukamurella paurometabola
  misc_feature (1)..(366): tr|A0A3P8MB87|A0A3P8MB87_TSUPA Isochorismate synthase d hbC OS=Tsukamurella paurometabola OX=2061 GN=dhbC PE=4 SV=1
MTASTSGESGHPHFLLTAAGQRLAARGTVATFVDPHAAAAALRAGTAPAVVGALPFDLDDPAALTVPEQFGDAAPGAGRPAGGAPADLPTLTQTAQHPAPAEHVDRVRRAVALIDASELQKVVLARAVDFEADAPLDPLAVAAALEQRDLEGNAFAVDLRAAGGGYRGRWLVGSSPEILVGRMGNTVFCHPFAGTATSPEGLLDSQKDREEHAYVVDEIAAALAPLCAELDVPAAPSVTRAGPVWHLGTKIEGRLADPATSALDLALALHPTPAVCGFPRRTAARAIAEIEGERGFYAGAVGWTTANGDGHWRVSIRCAELDGARLRAYAGGGIVGASDPQAELAETRNKLRTVLGPFRLTETARS

SEQ ID NO: 95046 - protein, 359 aa, Tsukamurella sp.
  misc_feature (1)..(359): tr|A0A5C5S6W4|A0A5C5S6W4_9ACTN Isochorismate synthase O S=Tsukamurella sp. HKU72 OX=2592068 GN=FK530_01645 PE=4 SV=1
MNQESDHQHFLLTAAGQRLAARGTAATFTDPHAAAAALRAGTAPAVVGALPFDLADPAALTVPEHFGDVADARAAGTDAELPTLTQTAQHPAPAEHVDRVRRAIALIDDSELLKVVLARAVDFEADAPLDPIAVAAALEQRDLEGNAFAVDLGAAGEDYRGRWLVGSSPEILVGRMGGTVFCHPFAGTATSPDGLLDSPKDREEHAYVVDEIASALAPLCAELDVPAAPSVTRAGPVWHLGTKIEGRLADPSTTALDLALALHPTPAVCGFPRRTAAGAIADIEGERGFYAGAVGWTTANGDGNWRVSIRCAELDGARLRAYAGGGIVGASDPQAELAETRNKLRTVLGPFRLTETARS

SEQ ID NO: 95047 - protein, 402 aa, Tumebacillus algifaecis
  misc_feature (1)..(402): tr|A0A223D397|A0A223D397_9BACL Isochorismate synthase O S=Tumebacillus algifaecis OX=1214604 GN=CIG75_13315 PE= 4 SV=1
MTTFTVSTAEKATQLLEDYQAGSSFFFSSPLRTLLARGTLLSLPKGESGKLAEHVDELLKHAKQSEEDVSIIVGAVPFDHRRPAQLVVPTSVQIAGPLHFDANAAENPPASTTYEIEPVPTPEQFMRGVESGLARLESGELCKIVLSRTLQMTSTTPVDIHQLLKNLARKNKHGYTFAVDLPGDEESDSRYSKRTLIGASPELLVSRTGMTVTANPLAGSTPRSKDPIEDQKRAQALLASAKDLHEHAVVIDAVAAALRPFCRTLEVPESPSLVHTETMWHLSTTITGELSDPSTSSLEVALAMHPTPAVCGTPTDLARTAIGEIEPFDREFYTGMIGWCNSQGDGDWVVTIRCAEVEDRSMRLYAGAGVVLGSSPEAELAETSAKFRTMLHAMGLNNETTS

SEQ ID NO: 95048 - protein, 466 aa, Unknown
  misc_feature (1)..(466): tr|V4XMY7|V4XMY7_9ARCH Isochorismate synthase OS=uncult ured archaeon A07HR67 OX=1412871 GN=A07HR67_01780 PE=4 SV=1
MEPARSRSSPTLVSRTTAVESPAFAAAFEALPTPRTTWTAPDDALVLGGGAAATLTADGADRFAAIRAATDELFASGDVHAGTEAARPRVFGGFAFHEGACAGEPWESFPEARFVLPRIQVTFADNGTWLTVTDAGPDASATAVETRLDREVERLAGRQAAESRPPRPGIRDQRRTTSRDAWRASVTAALGRIGDGEIRKVVLAQALEAALDDKFPRAATLERLAAKYPDCHRYCFEPDDGSSVFFGATPERLVSLRGRTVETDALAGTTGRGETPAEDEWLAEELLADDKNVHEHELVAETVRDQLEPFAASVSAGDRRVRRLATVQHLHTPITAELSADRHVLELVEALHPTPAVGGLPPGRALETIHETEPFDRGWYAAPVGWIDAAGNGAFAVAIRSAVATRRLATLFAGVGVVADSDPDREWDEIQLKYRPILDELETGSDPDAARLDDPLWTDADRPADD

SEQ ID NO: 95049 - protein, 424 aa, Unknown
  misc_feature (1)..(424): tr|A0A486XD59|A0A486XD59_9PAST Isochorismate synthase M enF OS=uncultured Avibacterium sp. OX=1936169 GN=menF P E=3 SV=1
MDNLQSIKQQLIERISPTLPTQQGIACVQAEIETALNLLSWLKGQKTYPQFYLNLRDSTQVVAAIGQVRGFSQLNQAQAFMLQSGYPLVGGVQFYGESQFFLPRLYLQQQENKLNIQLFIDQTKNIEQERQACLNALKTFEKSTALCPIQQSIHFGKKRAEQREWCEWVEKGLQHIKQGVLNKIVLANETLFQSEGKLNAYDFLGESERYNFGCYHFLFAETEKCIFIGSSPERLYQRQGSQLRTEALAGTALVGENAQETEQQAQWLLQDEKNIYENQLVVDDIKQHLAPYSQHITVSPLGLKTLRQVQHLRRQISAQISPEYGDDIFLNAIHPTAAVAGLGRNEALAFLRQTETFDRRWYAGTLGVMQKEWAEFCVAIRSAFIEQEQIRVFAGAGIVEGSIPLLEWQEIERKALGLISLLQE

SEQ ID NO: 95050 - protein, 143 aa, Unknown
  misc_feature (1)..(143): tr|A0A2I6QKA7|A0A2I6QKA7_9BACT Isochorismate synthase O S=uncultured bacterium OX=77133 PE=4 SV=1
MKEVLRERSSELHVPSSPQLITTPTLWHLATPFEGKANSQENALTLACLLHPTPALSGFPHQAATQVIAELEPFDRELFGGIVGWCDSEGNGEWVVTIRCAKLRENQVRLFAGAGIVPASSPLGEWRETGVKLSTMLNVFGLH

SEQ ID NO: 95051 - protein, 371 aa, Unknown
  misc_feature (1)..(371): tr|A0A1C5QBL6|A0A1C5QBL6_9BACE Isochorismate synthase e ntC OS=uncultured Bacteroides sp. OX=162156 GN=entC PE= 4 SV=1
MNKPDSQIHKLIDRMTCSDKSFAIYRLPWTDTPILVMQDGVENHVFANLKELNGEKGFVISPFRFTEDHPGVIIRPDVTASGWDEITEKISNVVIEERPSDHTTSSEISQTEPDLKKTYIETFSRFIGPLKNKTFSKLVLSRNAGYTLSDNFSPLEAFITACNSYPRMMISLSHTPVSGTWIGSTPEIILSGEGNTWNTVALAGTMPMQGEVMPTEWHKKEQDEQAFVSEYINKVIKKFSSKIAIKGPYTTRAGQLVHLRTDFQFGLKKTSELGNLLDALHPTPAVCGLPKDKAYDFIIENEGYDRKYYSGIIGWLDPNGHTTLYVNLRCLNVSGNYATLYAGGGILPSSDSNSEWEETQHKMKTIKLVIS

SEQ ID NO: 95052 - protein, 432 aa, Unknown
  misc_feature (1)..(432): tr|A0A212IEA3|A0A212IEA3_9ENTR Isochorismate synthase M enF OS=uncultured Citrobacter sp. OX=200446 GN=menF PE= 3 SV=1
MHSITTALESLMRHLSQEIPAAPGIRIYDIPFPLNDAFDALGWLASQPVWPQFYWQQRNGDEEAAVLGAVAAFSSLESAQQFLRQHDNHPDLRIWGLNAFEPQRGNLLLPRLEWRRCAGVASLRLHLYSDVSLREDAAHAIAFISSLAPVKPLPALRLNLTGEQNWPDKAGWTNLIKLATQTINREELDKVVLARATDLQFSQSVNAAAVMASSRRLNLNCYHFFMAFSADSAFLGSSPERLYRRRDTALRTEALAGTVANHPEDHRAWQLGEWLMKDDKNQRENMLVVEDICQRLQGCTQTLDVLPPQVLRLRKVQHLRRCIWTELNQADDTLCLMQLQPTAAVAGIPRELAREFIQQNEPFEREWYAGSAGYLSRHQSEFCVSLRSAKISANVVRLYAGAGIVRGSDPEQEWQEIDNKAAGLRTLLQMEA

SEQ ID NO: 95053 - protein, 364 aa, Unknown
  misc_feature (1)..(364): tr|A0A1Y5PKI5|A0A1Y5PKI5_9MYCO Putative isochorismate s ynthase OS=uncultured Mycobacterium sp. OX=171292 GN=me nF PE=4 SV=1
MAQPSFVLSGPAGTVVAEGIQTGYDDAAAAAAALAAGSADVVVGALPFDIRGKAALLSPTSVTFTDALPVWTTAALPAVRIAATLPSPDEHRARIRTALDCLTKPESALQKVVLARALSLVADGPLDERAILRRLVADDAEATAYLADLSPAGGGYTGTALVGASPELLVARSGELVTCQPFAGSAPRSADPATDAANGAALAESGKNRHEHQLVVDTMRAALEPLCADLDVAGQPQLSHTAALWHLSTPIRGRLRDTSITAIDLALALHPTPAVGGVPTQDAVDLIAQLEGDRGFYAGAVGWCDARGDGRWVVAIRGAQLSDDRRRALAQAGGGIVAESDPDDEVAETTTKFRTILSALGVQQ

SEQ ID NO: 95054 - protein, 457 aa, Ureibacillus terrenus
  misc_feature (1)..(457): tr|A0A540V064|A0A540V064_9BACL Isochorismate synthase O S=Ureibacillus terrenus OX=118246 GN=FKZ59_10905 PE=4 S V=1
MQQKWLKTTEVEVASNKLSFYIETIEVNQLSPLAFFAAGERKYKGKRFFWQNREKTLAIVGLGQAIILENRRIDRFDDIEFKWKELTKNIVMEEQEPQPILFGGFTFDPENVEPGEWDGFPSSYFTVATFQLTKQHEKTYVSIHLITDRQDSSALFDQLREERDQLIHAAQVKELKTYEKPEIRTIDERNKDNYFQAVQSVTNLIRNHKADKVVIARSLELEFKGQPSSPQVIYQILNEQPESYLFALERDNLLFFGATPERLVKVENQYAYSACVAGSIKRGKTAEEDKKLGEQLLNDSKNLKEHQYVVDMIASTFKKHCEHYKVPKRPKLLKIRDIQHLYTPVEGKLFDHATILQLVKHLHPTPALGGVPRNKALEMIREFEKMNRGLYAGPVGWMDADGNGEFVVAIRSAALIDDKAYLYAGGGIVADSNPMTEYDETLVKFRPMLRALGGQIQ

SEQ ID NO: 95055 - protein, 459 aa, Ureibacillus thermophilus
  misc_feature (1)..(459): tr|A0A4P6UUU7|A0A4P6UUU7_9BACL Isochorismate synthase O S=Ureibacillus thermophilus OX=367743 GN=DKZ56_12400 PE =4 SV=1
MQQKWLKTTEVEVASNKLSFYIETIEVNQLSPLAFFAAGEKDYKGKRFFWQNREKTLTIVGLGQAIVFENRGNHQRFDEIEQKWKELTRNIVMEEQESQPILFGGFTFDPDNRELGEWDEFPQSYFTVATFQLIKKHEKTYVSIHLITEQQNSAALFDELRDERDRLIHAAQVKELKTYEKPEICSIHERNKDNYFQAVEKVTNLIRQKEADKVVIARSLELAFKNQPSSPQVIYQIMNEQPESFLFGLERDHLLFFGATPERLVKVKKQYAYSACVAGSIKRGKTAEEDKRLGEQLLNDSKNLKEHQYVVEMIEKTFKKLCEEYRVPKRPKLLKIRDIQHLYTPVEGKLYNDATILQLVKYLHPTPALGGVPRNKALEMIRKYEKMNRGLYAGPIGWMDADGNGEFVVAIRSAALIDDKAYLYAGGGIVADSNPMTEYEETLVKFRPMLRALGGQFNE

SEQ ID NO: 95056 - protein, 445 aa, Vagococcus fluvialis
  misc_feature (1)..(445): tr|A0A1X6WNA8|A0A1X6WNA8_9ENTE Menaquinone-specific iso chorismate synthase OS=Vagococcus fluvialis bH819 OX=12 55619 GN=FM121_06620 PE=4 SV=1
MKKELINFELPEKLKNEIITEPTLISWVFNINADPLISDYERTSTHYAEHFYFENATDNSGIYGVGSLPAVFTRIITNASVEMTGPIEMISGLFDETTDSSEIWGELSQTVTYLPKIIRTEKQNQQWVTINMLVNSTEDLFVQWQEEIKNLYLFRQLERPSTKKINKILIKEELKIEDWLQEVELSVAHLKSSETLNKIVLARQLKIMTEKSINPVDVLKRLRAEQPDTYRFVVAKNQSYFIGATPERLLQATTTDYSTVCVAGSIKRGKTLKEDQQLGDGLLSDQKNVIEHHYVVRWLQEEMTKLTTSLDKKIPVSLLKNRDIQHLFLPIKGERKKEVTFSEGIAALHPSPALGGLPKKEAINWIKNHEYYPRGLYGGPLGWRNILEDTGEVVVGIRSAYICDNQAILYAGCGIVEDSIATLEREETKVKFQPMLRALGGQINE

SEQ ID NO: 95057 - protein, 460 aa, Vagococcus sp.
  misc_feature (1)..(460): tr|A0A4D7CUQ5|A0A4D7CUQ5_9ENTE Isochorismate synthase O S=Vagococcus sp. MN-17 OX=2571750 GN=FA707_02455 PE=4 S V=1
MMIPSQLLTTPKHDYYSWVMPLDCTDSPLTFYKKITNDQLKPNMYWETPDQTTQFCAWGAEMLLSEAQASLTKIKQLPTNSSIFEGSDLDQKIEATGCLLVGGFSFDQADCQPADTWGELAQGYFFIPTFIITNHEEQTYLTINIKHDDHTSLADAWQQRIASFEHLVAQVLTDSPVVTQVETEEVATQAWVSLVEETVNEIKTQPALTKVVLARETAVEQDQVFEPAQIVARLKQQQAATYFFSLSSGEHTFIGATPERLLKATAKQLVTASIAGSTPRGTTELEDQQLGEALLNDQKNRKEHLIVVQRIIKDLENITQTEIHAHEPVLLKNRDIQHLHLPIIAQRSEATRFLDVVEQLHPTPALGGEPKALALEWLRKNEPLNRGLYGAPIGWYQPTTDQGEFAVGIRSGVFHGETGRLFAGCGIVADSQAELERIETKVKFRPMLRGIGGQLDDTSK

SEQ ID NO: 95058 - protein, 438 aa, Variovorax sp.
  misc_feature (1)..(438): tr|A0A520E7W1|A0A520E7W1_9BURK Isochorismate synthase O S=Variovorax sp. OX=1871043 GN=EOP81_03100 PE=4 SV=1
MSFELNTRHSGDDRATGPDGDFSTDHADTLDALLAAYQPGDSLFASPSGAWLGQGVACTLRAGDGTAWPASVEGRAQAAADVGRRARALLAQAEQTPGLHDPIVMGVVPFDVRQPARLVVPRQVRRAVGGQRIEATAPGSAWAPVVLARPAQPAPEPAAYEAAVTNALARFARGDLDKVVLARTLRLTLQAAPDRAALLRRLVAGNTHGYTYAIALTDAAGAAAEGLAEPAAFVGATPELLVRRTGRQVVVNPLAGSAARSADPVRDPQIGQALMQSPKDRHEHAVVIDSVARALRPLCRTLTVPEAPSLVATDALWHLSTTLTGELADPATSSLDLALALHPTPAVCGHPSAPAFDAIAALEPFERGFFAGFVGWCDARGDGEWAVALRCAELRDRELRLYAGAGIVAGSVPASESLETGTKFRTMLSALGLGSALD

SEQ ID NO: 95059 - protein, 352 aa, Veillonella atypica
  misc_feature (1)..(352): tr|E1LBF2|E1LBF2_9FIRM Isochorismate synthase OS=Veillo nella atypica ACS-134-V-Col7a OX=866778 GN=HMPREF9684_1 424 PE=4 SV=1
MDRQSNRIVVGAKRLATVKDDEDRHNYAYVFYGDTFFDTSKDPKWSGMGHEMIAFTHYYIVENGEAFYLHAGESVSTEDIEVPHIRHDFRETSDDKGDWDRLMNAISDGIGRGEMTKVVASREVQFTSDTPFNVASILTNLVENNPNCFIFGYEKDGRTFVGASPEILVRHRGSEILSYALAGTAPKDGPNAWTKEQLLSDKKNLFEHNIVRDRIVNTMKQITPDVTVGETGIMELAHLYHLRTIITAKDSTKSLVEWAKLLHPTPALGGEPREKAMALLETYEAHERGMYAAPFGFMKDMGDGIVVVAIRSALIMDNILYAYAGCGVVADSDADEEYIETNNKMRTILDAL

SEQ ID NO: 95060 - protein, 387 aa, Veillonella criceti
  misc_feature (1)..(387): tr|A0A380NKQ5|A0A380NKQ5_9FIRM Isochorismate synthase d hbC OS=Veillonella criceti OX=103891 GN=dhbC PE=4 SV=1
MKYTIFPTEVTNPLAVWQQFEGSERVYWHDTQVNRVIVAAGRVKRITEAELPEYPWAWYSQSFFDTMNDSTWQDMGNELVVFTYYYVKEEGKAYWVTADSIAPVITETVVPHIKHTYEMVTTGDYPAWERLFEGIQKSIQSGEVKKVVASRKVAFHSDRPFQVTSIIHNLVEQNQGAFIFAYAKGEAVFLGASPEVLVRKRGQDFMSYALAGTLKKDDIQDGGERLLTDAKNLREHQIVIDRIRQTMLTLCDKVDVQDTHIMELPNLYHLRTLLYGHDTNDSILTMAKALHPTPAMGGEPREKALQVLKTYEPYERGLYASPVGWVCGNTPLFREAGDGLLIVGIRSALIHGQDLYAYAGCGVVAESDCEAEYTETATKLQTILKAL

SEQ ID NO: 95061 - protein, 380 aa, Veillonella dispar
  misc_feature (1)..(380): tr|A0A4Q5BK03|A0A4Q5BK03_9FIRM Isochorismate synthase O S=Veillonella dispar OX=39778 GN=EAI97_08195 PE=4 SV=1
MKYNKEPLKLNSPVSFWMNFPNEERVFWVDRQSDRIVVGAKRLATVKDDDDRHNYAYVFYGDTFFDTVKDPKWSNMGHEMIAFTHYYIVENGESFYLHAGESVPIENYEVPRVHHNYKETSDDKADWNRLMNAIANGINGGEMTKVVSSRKVEFTSETPYNVSSILANLVDNNPNCFIFGYEKDGRTFVGASPEILVRHRGSEILSYALAGTAPKDGPNAWTKEQLLTNKKNLVEHNIVRDCIVNTMRQITPHVTVGETGIMELSHLYHLRTIITAKDSTKSLVEWAKLLHPTPALGGEPREKALALLQEYESHERGMYAAPFGFMKDMGDGIVVVAIRSALIMDNVLYAYAGCGVVADSDADEEYAETNNKMRTILDAL

SEQ ID NO: 95062 - protein, 380 aa, Veillonella parvula
  misc_feature (1)..(380): tr|A0A418PK21|A0A418PK21_9FIRM Isochorismate synthase O S=Veillonella parvula OX=29466 GN=D3219_00910 PE=4 SV=1
MIYNKEPLELNSPVAFWLNFPNEERVFWVDRQSDRIVVGAKRLATVKDDEDRHNYAYVFYGDTFFENSKDPKWAGMGHEMIAFTHYYIVENGESFYLHAGESVPITDFEVPRVRHNYKETSDDKAAWDSLMNAIADGISSGEMTKVVSSREVQFTSETPYNAASILANLVDNNPNCFIFGYEKDGRTFVGASPEILVRHRGSEILSYALAGTAPKHGPNAWTKEQLLTDKKNLFEHNIVRDRIVKTMESITPDVTIGETGIMELAHLYHLRTIITAKDSTKSLVEWAKLLHPTPALGGEPREKALALLQKYEAHERGMYAAPFGFMKDMGDGIVIVAIRSALIMDNVLYAYAGCGVVADSDADEEYAETNNKMRTILDAL

SEQ ID NO: 95063 - protein, 380 aa, Veillonella rodentium
  misc_feature (1)..(380): tr|A0A239YHT2|A0A239YHT2_9FIRM Isochorismate synthase d hbC OS=Veillonella rodentium OX=248315 GN=dhbC PE=4 SV= 1
MIYNKEPLELNSPVAFWLNFPNEERVFWVDRQSDRIVVGAKRLATVLDDEDRKWYAYVFYGDTFFDASNDPKWEGMGHEMIAFTHYYIVENGESFYLYAGEPAVIEDVPVPRVRHEYAETSDDRADWDRLMNAIGESIAHGKTTKVVASREVQFTSPEPFNVASILANLADNNPNCFIFGYEKDGRTFLGASPEILVRHRGSEILSYALAGTAPKDGPNAWTKEQLLTDSKNLLEHNIVRDRILNTMKDITPHVSVGETGIMELAHLYHLRTIITATDSTKPLVEWAKLLHPTPALGGEPREQALALLQKYETHERGMYAAPFGFMKDMGDGIVVVAIRSALVIGNTLYAYAGCGVVGDSDADAEYEETNNKMRTILDAL

SEQ ID NO: 95064 - protein, 380 aa, Veillonella sp.
  misc_feature (1)..(380): tr|F9N6H2|F9N6H2_9FIRM Isochorismate synthase OS=Veillo nella sp. oral taxon 780 str. F0422 OX=944564 GN=HMPREF 9200_1325 PE=4 SV=1
MKYIKEPLQLDNPLEFWLNFEGEERVFWVDRQSDRVVVGAKRLAVVQDDIDREQYAYVFYGGTFFPTVKDKKWSNMGYEMVAFTHYYIVENGESFYLHAGEGVDIQRHKIERVDHAFTETSDDKQDWDTLMDAILTNIHEGRMTKVVSSREVEFTSPTRFDVVSILDRLVENNPNCFIFGYEKEGRTFVGASPEILVRHRGDEILSYALAGTAPKFGPKAWTKERFLNDHKNRVEHNIVRDRIVHTMRQVTEDVAVGETGIMELSRLYHLRTIITAKDSTKSLIEWGQLLHPTPALGGEPRELAMDLLAKYEAHERGMYAAPFGFMKDMGDGILVVAIRSALIMGNRLYAYAGCGIVSESNSDEEYEETINKMGTILDAL

SEQ ID NO: 95065 - protein, 535 aa, Verrucomicrobia bacterium
  misc_feature (1)..(535): tr|A0A3M1GWM7|A0A3M1GWM7_9BACT Isochorismate synthase O S=Verrucomicrobia bacterium OX=2026799 GN=D6781_01655 P E=4 SV=1
MAPGGSGWPGGTPSPARKSGKPRSSFRGPTSPEPRQRPRSPHPKSRSPRLMKLLPLAPEDAGSREAFGRFLAACREQARARGRPQLASITLEASHLDPLAVLESIYEPGELHFYCEQRSSDFAVAGAEAVVRFDPEGESRFAHARAFIEETLENTIAIGDLSLPFGGPHFFATFGFFGSPKRRSAFPSATVFVPRWQVAGREGRFSAVANLLVEPDADLEAIAAKVWRAREKFSAFDYSRAQSEPVRGAAAFAVTEVGDGPDFRRRVEAALGLIEAGAFEKIVLARAVDAVAPSALHPLGVLNALRQRFPECYAFSAGNGHGQSFIGATPERLVRVIDGTLATEALAGSAPRGRTAAEDARFASELLRSEKDRREQRLVLDSVLRRLRALGIEAAAEGPARIKRMQNVQHIHTPVRGAMPDGMHILDAVSALHPTPAVGGTPREAACAHIPTLEPFERGLYAGPLGWVDPQGGGEFVVGIRSALVDGDRARLYAGAGIVAGSEPEREFRETELKFRAVLDALREVEAGDSAGGER

SEQ ID NO: 95066 - protein, 474 aa, Verrucomicrobiae bacterium
  misc_feature (1)..(474): tr|B5JNX2|B5JNX2_9BACT Isochorismate synthases subfamil y OS=Verrucomicrobiae bacterium DG1235 OX=382464 GN=VDG 1235_3063 PE=4 SV=1
MDTIQLDPTQAKSYEALYAFLQGCQFKAVEKGRAQLVSIAAASSALDPLAVLESIYEDRQQHFYVERKRDDVAIAGAENAISYSPESCTRFKSVRDWIEDTLDNTIAVGDPNLPFFGPTFFCGFSFFEKVDEDASFPASTVFVPRWQVAVTGGRCVAIANATIADGDDVEAVAKRIWNANTKFRTFDYSDEEERSKRERLKVLETTECGGDSVFKESVAAALERISAGEFEKIVLARALDLRADQSFHPLEILNTLRERYEDCYAFSIANGKGQSFIGASPERLVSVSKGRVNVDVLAGTASRGKTASEDARLGAGLLESEKDRREHQIVYESVCRRLSDLGLIVKGECLPSLKKLQNVQHLFVDVEAELVNGIHLLDMVTALHPTPAVGGTPREAAVPRIRELERFDRGLYAGPIGWINAKGEGEFLVGIRSALVDGEKARLYAGVGIVEGSVPEREYVETNLKFQALKENLL

SEQ ID NO: 95067 - protein, 396 aa, Verrucosispora sp.
  misc_feature (1)..(396): tr|A0A372G658|A0A372G658_9ACTN Isochorismate synthase O S=Verrucosispora sp. LHW63014 OX=2294034 GN=D0Q02_03075 PE=4 SV=1
MTITHPNVTVGRALDLLAKYDATAPFFFASPRGTLLAEGRSHPVPATADLSTAVRDVLDLATADGDDDPLVVGAVPFDPSATPRLCVPRRIRRSGPLPSRFALPSRFALPSRFALPMEADRVDARRVEVPGRATYADGVRRAVTRLRAGELDKVVLARALDIVTTEPIDIGTLLRRLAARDPAGYTFAVDLGAGTLIGNSPELLVSRQGDLVTANPLAGSLPRSDDPFEDFGQAQALLASRKDRREHALVVEAVADGLRPLCTDLEVPAEPSLIRTAAMWHLSTVVTGRVLDPAVRSMTLAAALHPTPAVCGTPARAARAAIAEYEAFDRGFYTGLVGWENNSGDGEWVVALRCAVAHGSSARLYAGAGIVADSDPAAELAETTAKFRTMLTGLEL

SEQ ID NO: 95068 - protein, 386 aa, Verticiella sediminum
  misc_feature (1)..(386): tr|A0A556AZG7|A0A556AZG7_9BURK Isochorismate synthase O S=Verticiella sediminum OX=1247510 GN=FOZ76_02995 PE=4 SV=1
MTPLSDDAPRPPVPDFLLDGPRHSLTVAGRKRDLPSGALPTLAERAASFFDSHPDGPRLLVGAIPYDRRADDALFQPDALVARRWTAPAASGGGTRAVRVVAEPSGAGYRAAVAEAVRRIQRGEFDKIVLSRSLRLLGEQPHAEAELLARLQRDPEATVFRVPLPARRAGERRRLLGATPELLLQRQGRQVVSHPLAGSARRHADTARDRAAGAALLASDKDRREHAMAAEMVLDALAPYCDRLSAPQGMALVSTAQMWHLGTRIEGRLRDPESSCAELLAVLHPTPAVGGMPRAAAEAALPALEGYDRGFYAGAVGWIDGAGDGCWYLALRCAELLDTEARLYAGAGIVAGSDPALEEAETSAKFLAMLATFGIDESGRSLDNAA

SEQ ID NO: 95069 - protein, 424 aa, Vespertiliibacter pulmonis
  misc_feature (1)..(424): tr|A0A3N4VL40|A0A3N4VL40_9PAST Isochorismate synthase M enF OS=Vespertiliibacter pulmonis OX=1443036 GN=menF PE =3 SV=1
MSLFTELKQKLSQQLDRLPNEQAGLIELKAKVTLENRNLEINLLSWLKGQSTFPQYFWQSRDQQLTFATIGTVIQFDEISHAQHFSQQTGFRLFGGIKFEGQCHFILPRLVLTKKSDQLTACLYVNPQEKSKYIELIDQLEYCSNVHSIFPTHILSSNKVSDFPRWEDLLQNAIQAIKQQQFCKVVLANATTLTVEEPISAYDLLTASQQKNTGCYHFLWAENANSTFIGSSPECLYQRNGRQLQTEALAGTVAVTQDLNQTEHNRLWLLNDKKNIHENQLVVDDIQQHLQDCCDDISINEIEIKKLHNVQHLRRKIQATLHPTINDADCLTRIHPTAAVAGLPRSKALAFISYNEGFTRGWYAAAFGSFSQHSSEFCVALRSGLVSNNQITFYAGAGIVEDSQAQSEWQEIERKALALASLLQ

SEQ ID NO: 95070 - protein, 485 aa, Vibrio aerogenes
  misc_feature (1)..(485): tr|A0A1M5XZE8|A0A1M5XZE8_9VIBR Isochorismate synthase M enF OS=Vibrio aerogenes CECT 7868 OX=1216006 GN=menF PE =3 SV=1
MVHFHQAVRQLINQVQHSSDKTLRCTLTLSAPPSFGLPDWLECQTLFPKFYWQDREGQEEVVALGQCYRFDDPAPAYSVISAGQRIWGGRSFDGGTDKSPGCPESFFFMPLVELIRDGDVWILAVNLSGNPLSSDQFSDNQFPGNQCSGNQSPGEQCSENQFCENQVPENQCCKNNSAESQFALNQSRAIDALEQLVMNVPELKPVKTGIQSVVHQPDEQQWCDLMDKALSKIQQGAFDKVVLARQSSYGLKTPVRAAQLLKASCRQNHHSFHFLLAVDGQRSFTGSTPERLYLRVGQSLETEALAGTTGRGQTPVQDQELADWLIHDDKNIQENQYVVDDIVDHLTPLSLEIDTVEQPRLIKLSRVQHLKRRIHARLKAGVNGVHLLSSLQPTAAVAGYPRPAAQAFIAQEEPFSRGWYAGAIGYISHEKAEFCVAIRSALIVGEQIRLYAGAGIVPGSVAKEEWQELNRKMSTLLSLMADDEQ

SEQ ID NO: 95071 - protein, 437 aa, Vibrio agarivorans
  misc_feature (1)..(437): tr|A0A2K1DUV3|A0A2K1DUV3_9VIBR Isochorismate synthase M enF OS=Vibrio agarivorans OX=153622 GN=menF PE=3 SV=1
MSSFHQIVNTLIQRIEIAGSDISRIVESMDEHPCFEPLDWLEAQTLFPKFYWQSRNAYEEVVALGQHHIFDAPGPAYDLLSSGQRVWGGCGFDRLKIQANFNQSSWFFLPKIELIRHHRRWSLAVNLSGDNTSTIEDLRQLIAEVPKLTAVNTSICSIKHSPNRFEWQRLVEQALAEIGQHKFKKVVLARQSTLKLDSSLSAAQLLKSSTIHNHDSFHFLLSLNRQQSFIGSTPERLYSRVGRTLKTEALAGTVGRGDNAAQDSAFANWLTQDVKNLKENQYVVDDIVESLSPYIETIDVESNPSLVRLKQVQHLRRRIEVTLKPEINGVQLLAALQPTAAVAGLPRQSSMQFILNNEPFSRGWYAGSIGYLSHESAQFCVAIRSALVMEGNVQLFAGAGIVPGSIAEQEWAELEKKTSTLLTLISESTSAREYHES

SEQ ID NO: 95072 - protein, 435 aa, Vibrio alfacsensis
  misc_feature (1)..(435): tr|A0A347URR3|A0A347URR3_9VIBR Isochorismate synthase M enF OS=Vibrio alfacsensis OX=1074311 GN=menF PE=3 SV=1
MSQFHQAVKRIIERVQQAEGNQTRLVEPLGVKPNFAFIDWLEAQPLFPKFYWQSRDTREEVVALGQLHTFVEPGPAYTILGEGQRVWGGRSFDGQHEKNRRCMPSFFFLPQIELIRFDQQWSLAVNISDDKTRTLAGLQKLVCDVPSLAPVSSHILSIEHSPSESQWHDLVDKVLTGIKNDDFKKVVLARKSSVHLDTELSAAQLLKASYLNNHHSFHFLFSLDSKHSFMGSTPERLYSRVGHELHTEALAGTIGRGSNAAEDMELANWLSNDSKNLNENQYVVDDIIERLQPHSEAVEVDKEASLVRLRKVQHLKRHIHAQLHSGINGVQLLSALQPTAAVAGLPRKESMQFILDNEPFARGWYAGSMGYISHERAEFCVAIRSALILGDQVQLFAGAGIVPGSIAEHEWSELDKKMSTLLSLISEHPPLGVAS

SEQ ID NO: 95073 - protein, 435 aa, Vibrio alginolyticus
  misc_feature (1)..(435): tr|D0WVB3|D0WVB3_VIBAL Isochorismate synthase MenF OS=V ibrio alginolyticus 40B OX=674977 GN=menF PE=3 SV=1
MSQFHQAVKRIIERVQQSEGNQTRLVEPLSEKPNFSFIDWLDAQPLFPKFYWQSRDTREEVVALGQLHAFVEPGPAYTILGEGQRVWGGRSFDGQHEKNRRCMPSFFFLPQIELIRFDQQWSLAVNISEDKARTLAGLNKLVCEVAALAPISSHIRSIVHTPSQPQWNELVHKVLTGIENDDFKKVVLARRSTVQLDNTLSAAQLLKASYLSNHHSFHFMLSLDSKHSFMGSTPERLYSRVGHELHTEALAGTIGRGDNATQDMELANWLSQDQKNLNENQYVVDDIIDRLSPHSEVVEVEAEPSLVRLRKVQHLKRNIHASLRAGINGVQLLSALQPTAAVAGLPRQESMQFILDNEPFARGWYAGSMGYISHERAEFCVAIRSALVLGDQVQLFAGAGIVPGSVAEHEWAELDKKMSTLLTLISDHPPLGVAS

SEQ ID NO: 95074 - protein, 438 aa, Vibrio algivorus
  misc_feature (1)..(438): tr|A0A557P5V7|A0A557P5V7_9VIBR Isochorismate synthase M enF OS=Vibrio algivorus OX=1667024 GN=menF PE=3 SV=1
MSELPQVIELIIERIRRGQVSSENRISEVVNLPEDFSAIDWLEGQSLYPRFYWQSRDEREEVIALEQVNSFTNPLDAYSILAEQQRVWGGKAFDSEHSNTPELTSYFFLPKIEFIRQDNQWTVNANIDPDVELTIDALLQLKADYQPIETLVPQSSQIYFSPQFDEWKHILSKALTAIEAQEFEKVVLARKTLVELSKPISAAQLLKSSREQNHNSFHFLVSLAPNRSFVGSTPERLYRRSGDQVETEALAGTIGRSDDLVEDKKLSDWLMNDDKNQRENQIVVNDIIDRLGPYTENIAVHPEVQLIQLRRVQHLKRHINGRLSSEVKGIQLLSALQPTAAIAGLPREASLNFIRMNEPFTRGWYSGSLGYFGHHQAEFCVSIRSASLVDNTVKLYAGAGIVPGSEAEFEWQELNRKTATLLNLITDYPIENERGETV

SEQ ID NO: 95075 - protein, 435 aa, Vibrio anguillarum
  misc_feature (1)..(435): tr|A0A1Y0NVT3|A0A1Y0NVT3_VIBAN Isochorismate synthase M enF OS=Vibrio anguillarum OX=55601 GN=menF PE=3 SV=1
MSHFHQAIARLIEQINDAKDDDVRFVQILQEAPPFAPIDWLEAQPIFPKFYWQSRDTREEVVALGQLYTFSEAEPAYAILGQEQRVWGGRSFDGHTDKNRRCLSSFFFLPQIELICCDGQWSLAANITAERQRTLVALHKLQLEVSPLRGMTSHIKQVTHQPNEVKWQQLVNQVLEGIDHQAFKKVVLARQTTLSLDKPLSAAQLLKASAAHNHHSFHFLLAFDQKHSFMGSTPERLYARQGQTLYTEALAGTIGRGENASQDMELSHWLTQDSKNLNENQYVVDDIIERLTPHSERVDVEQDVRLVRLRKVQHLKRGIHAQLKKGVNGVQLLNALQPTAAVAGLPRKAAMDFIQANEPFARGWYAGSVGYFSHQQAEFCVAIRSALLVDNQVQLFAGAGIVPGSVAEHEWQELDKKMATLLSLISDHFPLGVAS

SEQ ID NO: 95076 - protein, 435 aa, Vibrio antiquarius
  misc_feature (1)..(435): tr|A7K663|A7K663_VIBAE Isochorismate synthase MenF OS=V ibrio antiquarius (strain Ex25) OX=150340 GN=menF PE=3 SV=1
MSQFHQAVKRIIERVQQAEGNQTRLVEPLSEKPNFSFIDWLDAQPLFPKFYWQSRDTREEVVALGQLHAFVEPGPAYTILGEGQRVWGGRSFDGQHEKNRRCMPSFFFLPQIELIRFDQQWSLAVNISEDKARTLAGLHKLVCEVATLAPISSHIRSIVHTPSQPQWNELVHKVLTGIKNDDFKKVVLARRSTVQLDNTLSAAQLLKASYLNNHHSFHFMLSLDSKHSFMGSTPERLYSRVGHELHTEALAGTIGRGDNATHDMELANWLSQDEKNLNENQYVVDDIIDRLSPHSEAVEVEAEASLVRLRKVQHLKRNIHASLKTGINGVQLLSALQPTAAVAGLPRQESMQFILDNEPFARGWYAGSMGYISHERAEFCVAIRSALVLGDQVQLFAGAGIVPGSVAEHEWAELDKKMSTLLTLISDHPPLGVAS

SEQ ID NO: 95077 - protein, 393 aa, Vibrio atlanticus
  misc_feature (1)..(393): tr|A0A558GY25|A0A558GY25_9VIBR Isochorismate synthase O S=Vibrio atlanticus OX=693153 GN=FQP88_12800 PE=4 SV=1
MKREVIGYSKMESDLLDRELLSSPFFFASPNNTMMGKGIENEFHQPIAFSELAEKANEMLQAAKKSEADNPVLFGVVPFNEENPTKFIIPEQLFISSSTRSLHSNPLSSADAHVISSPSGNHYKQGVSDLLDMFANTELSKVVLSRAIEVETDADIQQQTLLRNLLSINSKGYTFAANINDNQKLMGASPELLVAKKGSYLTSNPLAGSRPRSELDEQNQSSTNSLLNTNKDLHEHGLVVEEVERVMSKYCHNLYTPMIPSVIETKTMLHLSTVLEGQVNNPHTNVLEVAAELHPTPAVCGYPRQKAYEAIRKLEQFDRGYFTGMVGWCDSRGNGEWVVTIRCAEVQKRQMKVFAGAGIVDESHPQSELDETGAKMNTILTAAGIQLKDMLTA

SEQ ID NO: 95078 - protein, 437 aa, Vibrio azureus
  misc_feature (1)..(437): tr|U3C7T8|U3C7T8_9VIBR Isochorismate synthase MenF OS=V ibrio azureus NBRC 104587 OX=1219077 GN=menF PE=3 SV=1
MSSFDQVVQSLIQRIEVADDEITRIVESMNEPPCFELLDWLEAQPLFPKFYWQSRNSYEEVVALGQHHTFDEPGPAYAMLSSGQRVWGGCGFDHLKTQSNLNQSAWFFLPKIELIRRQNRWSLAVNLSGDNASTIEDLRQLIADVTELTAVNTSICSIKHSPNRFEWQRLVEQALAEIGQHQFKKVVLARQSTLKLDSSLSAAQLLKSSTIHNHDSFHFLLSLNRQQSFIGSTPERLYSRVGRTLKTEALAGTVGRGDNAAQDNAFANWLTQDVKNLKENQYVVDDIVESLSPYIETIDVESNPSLVRLKQVQHLRRRIEVTLKPEINGVQLLAALQPTAAVAGLPRQSSMQFILNNEPFSRGWYAGSIGYLSHESAQFCVAIRSALVMEGSVQLFAGAGIVPGSIAEQEWAELEKKTSTLLTLISESTSAREYHES

SEQ ID NO: 95079 - protein, 435 aa, Vibrio barjaei
  misc_feature (1)..(435): tr|A0A1J4R7I0|A0A1J4R7I0_9VIBR Isochorismate synthase M enF OS=Vibrio barjaei OX=1676683 GN=menF PE=3 SV=1
MSHLTKAITQLVEKLERAPQGTKRLEQELQGSPKTHGIDWLDAQPHYPKFYWQSRDTREEVVALGQLHTFSEAAPAYTILSEKQRVWGGRSFDGHSDKNRRCMSAFFFLPQIELIRFDEGWRLAVNIGMSKEVSIRALKQLVADAKELAPLASDIVSLRHTPEKAQWCDLVDDVLAGIQQDKFKKVVLARKTCVDLKHSISPAQLLKASYAQNHHSFHFLMALSPGHAFVGSTPERLYRRVGQELETEALAGTIGRGGNAAQDMELANWLTQDDKNINENQYVVDDILQSLSPHSDQVHLESELRLVRLRKVQHLKRNILAHLHKGINGVQLLQALQPTAAVAGLPRAEAIQYIQQNEPFARGWYAGSVGYLSHEKAEFCVAIRSALLVKDELQLFAGAGIVPGSIAEHEWQELDKKMSTLLSLISDQPSLGVAS

SEQ ID NO: 95080 - protein, 435 aa, Vibrio bivalvicida
  misc_feature (1)..(435): tr|A0A177XZ16|A0A177XZ16_9VIBR Isochorismate synthase M enF OS=Vibrio bivalvicida OX=1276888 GN=menF PE=3 SV=1
MSYFHQAVTELIERVKEAEDGVNRLVQVLEEKPDFAFIDWLEAQPLFPKFYWQSRDTREEVVALGQLHTFVEPAPAYTILAEDQRIWGGRSFDGHTGKNRRCMSSFFFLPQIELIRFDERWSLAVNLNAEKHRTLASLYKLQLEVSPILPVSSHIETIQHTPEKGQWSQLVDKVLTGIKNDEFKKVVLARKTEVNLDRPLCASQLLKASYLQNHHSFHFLLSLDKKHSFLGSTPERLYARQGQELYTEALAGTIGRGINASQDMELANWLSNDVKNLNENQYVVDDIIDRLTPHSEHVEVEQEARLVRLRKVQHLKRSIHAHLRKGVNGVQLLSALQPTAAVAGLPREESMAFIQKNEPFARGWYAGSMGFISQQRAEFCVAIRSALVLNDQVQLFAGAGIVPGSVAEYEWQELDKKMSTLLSLISDNPPLGVAS

SEQ ID NO: 95081 - protein, 446 aa, Vibrio brasiliensis
  misc_feature (1)..(446): tr|E8LQW1|E8LQW1_9VIBR Isochorismate synthase MenF OS=V ibrio brasiliensis LMG 20546 OX=945543 GN=menF PE=3 SV= 1
MNNNPHAYEADLSNFHQAVTELIERVKEAEDGVTRLVQVLEEKPDFAFIDWLEAQPIFPQFYWQSRDTREEVVALGQLHTFVEPAPAYAILAEDQRIWGGRSFDGQTDKNRRCMSSFFFLPQIELIRFDDRWSLAVNLTAEKHRTLASLCKLQLDVNPLMPVSAHIENIQHTPEKAQWSELVDKVLTGIENDEFKKVVLARKTAVTLDQPLCAAQFLKSSYLHNHHSFHFMLSLDRKHSFIGSTPERLYLRQDQELYTEALAGTIGRGSNASQDMELANWLANDSKNLNENQYVVDDIIERLTPHSEHVEVEQEARLVRLRKVQHLKRSIHAHLNKGVNGVQLLSALQPTAAVAGLPRKESMAFIQQHEPFARGWYAGSMGFISHQRAEFCVAIRSALIVDDQVQLFAGAGIVPGSIADHEWQELDKKMSTLLSLISDNPPLGVAS

SEQ ID NO: 95082 - protein, 434 aa, Vibrio breoganii
  misc_feature (1)..(434): tr|A0A193KA08|A0A193KA08_9VIBR Isochorismate synthase M enF OS=Vibrio breoganii OX=553239 GN=menF PE=3 SV=1
MSHLANAIKQLAQQVESAPRDVCRVEVAIEELCADSVLPWMGNQSLFPKFYWQSRDTTEEVVALGQARTFNEINPAYSVLNQDQRIWGGYAFPYKENKGRCLSSFFFLPHIELVRRKQDWFLAANLMEDRDAVRRAVYRLNGDTMSLSEHMPAVTDVLHTPNKELWNDNVELALETIHNSDLKKVVLARQTTIKLDSVLQGIELLALSRKQNRHSFHFLFQLEEGHSFIGSTPERLYSRRGQLIETEALAGTIGRHSNPAQDLQLANWLINDKKNLQENQYVVDDIVESLAPFCSNIEVEGEARLVRLRRVQHLKRHIQAELTKHADRGRLLQALQPTAAVAGLPRSLALEFIECHEPFSRAWYSGSVGYISEQSAEFCVAIRSALVQEDNLHLFAGAGIVPGSQAEHEWQELDKKMSTLLSLITEQSVLEQAS

SEQ ID NO: 95083 - protein, 435 aa, Vibrio campbellii
  misc_feature (1)..(435): tr|A0A344KGW8|A0A344KGW8_9VIBR Isochorismate synthase M enF OS=Vibrio campbellii OX=680 GN=menF PE=3 SV=1
MSQFHQAVKRIIERVQQTEGNQTRLVEPLSEKPSFAFIDWLEAQPLFPKFYWQSRDTREEVVALGQLHSFVEPGPAYIILGEGQRVWGGRSFDGQHEKNRRCMPSFFFLPQIELIRFDQQWSLAVNISEDKTRTLAGLKKLVCGVPSLAPISSHIRSIDHAPTQPEWNALVEKVLTGIDNDEFKKVVLARKSTVMLDSTLSAAQLLKASYLNNHHSFHFLLSLDSKHSFMGSTPERLYSRVGHELHTEALAGTIGRGGNATQDMELANWLSQDSKNLNENQYVVDDIIDRLTPHSERVEVENEPRLVRLRKVQHLKRSINVDLKAGINGVQLLSALQPTAAVAGLPRKASMQFILDNEPFARGWYAGSMGYISHERAEFCVAIRSALVLSDQVQLFAGAGIVPGSIAEHEWAELDKKMSTLLSLISDHPPLGVAS

SEQ ID NO: 95084 - protein, 435 aa, Vibrio caribbeanicus
  misc_feature (1)..(435): tr|A0A0A6QTP4|A0A0A6QTP4_9VIBR Isochorismate synthase M enF OS=Vibrio caribbeanicus OX=701175 GN=menF PE=3 SV=1
MSYFHQAVTELIERVKDAKDGVTRLVQVLEEKPDFAFIDWLEAQPLFPKFYWQSRDTREEVVALGQLHTFVEPAPAYAILADDQRIWGGRSFDGQTDKNRRCMSSFFFLPQIELIRFDETWSLAANLSADKHRTLASLYKLQHEVTPLLPVSAHIEHIQHTPEKAEWSQLVEKVLTGIENNDFKKVVLARKTAVTLSAPLCASQFLKSSYLHNHHSFHFMLSLDRKHSFIGSTPERLYLRQGQELYTEALAGTIGRGLNASQDMELANWLANDSKNLNENQYVVDDIIERLSPHSERVEVEQEARLVRLRKVQHLKRSIHAHLHKGVNGVQLLSALQPTAAVAGLPRKESMAFIRENEPFARGWYAGSMGFISHQRAEFCVAIRSALVLNDQVQLFAGAGIVPGSVAEYEWQELDKKMSTLLSLISDNPPLGVAS

SEQ ID NO: 95085 - protein, 438 aa, Vibrio casei
  misc_feature (1)..(438): tr|A0A368LM50|A0A368LM50_9VIBR Isochorismate synthase M enF OS=Vibrio casei OX=673372 GN=menF PE=3 SV=1
MSGLNQVIESLIEKIRNGQVSSENRISQPVNFPASFNAIDWLQEQILYPRFYWQSRDEREEVVALEQIHTFTDPIAAYAILGPQQRVWGGKAFDSEHAKTRHQSSYFFLPKIELMRQDDNWSLNVNLSDDHERTIRDLKKLKADYQPSAPLQPQSSTVHYSPQCDEWKHILEKALIAIESKEFEKVVLARKTIVELDQPIQAAQLLKASRVQNRNSFHFLMSLSPNDSFLGSTPERLYHRSGDMLETEALAGTIGRDDNPEKDKQLADWLLNDDKNLRENQIVVNDIIERLTPYTETIDVQPEAQLIQLRRVQHLKRHINGNLSLGVKGVQLLTALQPTAAIAGLPREASLNFIRVNEPFTRGWYSGSLGYFGHHKAEFCVCIRSAVVTENTVKLYAGAGIVPGSEAEFEWQELNRKTATLLNLISDYPIENDHCEGL

SEQ ID NO: 95086 - protein, 435 aa, Vibrio celticus
  misc_feature (1)..(435): tr|A0A1C3JFN8|A0A1C3JFN8_9VIBR Isochorismate synthase M enF OS=Vibrio celticus OX=446372 GN=menF PE=3 SV=1
MSHFQQTISALIERVQNAQASEVRCVEVLTQKPSFAFIEWLHAQPLFPKFYWQSRDTREEVVALGQLHTFSDPAPAYAILGEDQRIWGGRSFDGHTAKNRRCMESFFFLPQVELIRFDNTWSLAVNLSPDRVSSINALNKLSVEAAILAPLSAHIEQINHVPEREQWGNLVDKVLQGISDEEYKKVVLARKTTLQLDAPICAAQLLKASYLQNHHSFHFMLVLDSKHSFIGSTPERLYSRHGTELDTEALAGTIGRGENATEDMELANWLSQDSKNLNENQYVVDDIIERLTPHSQKVHVEKDTRLVRLRKVQHLKRNIHAQLNNGVNGVQLLAALQPTAAVAGLPRKEAMDFILEHEPFARGWYAGSVGYISHQRAEFCVAIRSALIVNDQVQLFAGAGIVPGSVAEHEWQELNKKMSTLLSLISDHPPLGVAS

SEQ ID NO: 95087 - protein, 435 aa, Vibrio chagasii
  misc_feature (1)..(435): tr|A0A2S7VIG6|A0A2S7VIG6_9VIBR Isochorismate synthase M enF OS=Vibrio chagasii OX=170679 GN=menF PE=3 SV=1
MSHFQQTISALIERVQNAQASEVRCVEALTQKPSFAFIEWLHAQPLFPKFYWQSRDIREEVVALGQLHTFSDPAPAYAILGEDQRIWGGRSFDGHTEKNRRCMESFFFLPHIELLRFDDTWSLAVNLSSDRVASINALNKLAVDAAILAPLSAHIEQINHVPEREQWGGLVEKVLKGISDEEYKKVVLARKTTLKLDAPICAAQLLKASYLQNHHSFHFMLVLDSKHSFIGSTPERLYSRHGTELDTEALAGTIGRGENATEDMELANWLSQDTKNLNENQYVVDDIIERLTPHSQSVHVEKEARLVRLRKVQHLKRNIHAQLNNGVNGVQLLAALQPTAAVAGLPRKEAMDFILEHEPFARGWYAGSVGYISHQRAEFCVAIRSALVVNDQVQLFAGAGIVPGSVAEHEWQELNKKMSTLLSLISDHPPLGVAS

SEQ ID NO: 95088 - protein, 395 aa, Vibrio cholerae
  misc_feature (1)..(395): tr|A0A0H3AK03|A0A0H3AK03_VIBC3 Vibriobactin-specific is ochorismate synthase OS=Vibrio cholerae serotype O1 (st rain ATCC 39541 / Classical Ogawa 395 / O395) OX=345073 GN=vibC PE=4 SV=1
MVMKREVVGYTTMSEHLIDTQLTRSPFFFASANQSMLGCGVAHAFQQAIPFAELANQAKQLLQQAKRDECDNPLLFGIVPFDPKTPTRFMIPRTLYVSSSPRLNRPAHLTRQVAKLISSPSGEQYKQGVSHLLNMFHHSGLSKVVLSRAIEIATEQEIALPTLLRSLLAINHHGYTFAASLDEQRKLIGASPELLVAKRGNYLISNPLAGSRPRSQDAQENAQRRASLLNTAKDLHEHGLVVEEVERIMSRYCRNLYTPMVPSVIETETMLHLSTLLEGQVSDPEVCALQVAADLHPTPAVCGFPRESAYQAIRELEEFDRGYFTGMVGWCDARGNGEWVVTIRCAEVGSHQMKLFAGAGIVDESLPQSELEETGAKMKTILAAAGIELNDVLTA

SEQ ID NO: 95089 - protein, 440 aa, Vibrio cidicii
  misc_feature (1)..(440): tr|A0A151JK16|A0A151JK16_9VIBR Isochorismate synthase M enF OS=Vibrio cidicii OX=1763883 GN=menF PE=3 SV=1
MFEVDLSYFHQAIGQLIERVKNAGEDESRLIEPIDTALKFTLIDWLEAQPIFPKFYWHSRDGREQVVALGQLHTFTEPAPAYAILAPGQRVWGGRSFDGLSEKNRRCMSSFFFLPQIELLQQDGKLSLAVNLGAERSRLLASLRKLACDVPLLAPLAAHICHIDHLPSQEQWQSLVDKVLHGIEQNAFKKVVLARKTSVQLDTPLCASQLLKASAQHNHHSFHFMLSLDRKHSFIGSTPERLYLRHDRELHTEALAGTIGRGVNATHDLELANWLAQDAKNLNENQYVVDDIVERLTPHAETVQVEAEPRLVRLRKVQHLKRDIHAHLKEGINGVQLLSALQPTAAVAGLPRQASMQFILDNEPFSRGWYAGSVGYLSHDKAEFCVAIRSALIVDDELQLFAGAGIVPGSIAKHEWAELDKKMSTLLSLIAEYPPLGVAS

SEQ ID NO: 95090 - protein, 458 aa, Vibrio cincinnatiensis
  misc_feature (1)..(458): tr|A0A1T4L6C4|A0A1T4L6C4_VIBCI Isochorismate synthase M enF OS=Vibrio cincinnatiensis DSM 19608 OX=1123491 GN=m enF PE=3 SV=1
MISTGTLNRVATVKSNLILDEVALSHFYQAIARLIEQINDARDNDVRFTQELAVKPPFAFIDWLEAQPVFPKFYWQSRDTREEVVALGQLYTFSDPAPAYAIVGEQQRIWGGRSFDGQTKKNRRCMSSFFFLPQVELIRFDDRWSIAANVNQDRQRTLATLRQLQHEVVPLASLHNEVLQVTHSPNLSDWTNLVHQVLDGIHNHAFQKVVLARQTRITLNQPIRASQLLKASYLENHHSFHFLLALDRQHSFMGSTPERLYYRQGLELQTEALAGTIGRGSDTSQDEQLADWLTHDSKNLNENQFVVDDIIERLTPYSEQVSVEPEAHLVRLRKVQHLKRCIHAQLKPGVNGVQLLRALQPTAAVAGLPRQAALDFITQHEPFARGWYAGSMGYFSQQKAEFCVAIRSALVVDDEVQLFAGAGIVPGSIAEHEWQELDKKMSTLLSLITDSLPLGLAS

SEQ ID NO: 95091 - protein, 434 aa, Vibrio comitans
  misc_feature (1)..(434): tr|A0A4Y3ISF8|A0A4Y3ISF8_9VIBR Isochorismate synthase M enF OS=Vibrio comitans NBRC 102076 OX=1219078 GN=menF P E=3 SV=1
MSHLANAIKQLAQQVESAPSDVCRVEVAIEELSADSVLPWMGNQSLYPKFYWQSRDTTEEVVALGQARTFNEINPAYSVLNQGQRIWGGYAFPYKEMKGRCLNSFFFLPHIELVRRKQDWFLAANLMEDRDAVRRAVYRLNGDLMQLSEQLPAVRDVLHTPNKELWNDNVELALETIHNSDLKKVVLARQSTIKLDSALQGIELLALSRKQNRHSFHFLFQLEEGHSFIGSTPERLYSRRGQLIETEALAGTIGRHSNPAQDLQLANWLINDKKNLQENQYVVDDIVESLAPFCSNIEVESEARLVRLRRVQHLKRHIQAELTKHADRGRLLQALQPTAAVAGLPRRLALEFIERHEPFSRAWYSGSVGYISEQSAEFCVAIRSALVQEDNLHLFAGAGIVPGSQAEHEWQELDKKMSTLLSLITEQSVLEQAS

SEQ ID NO: 95092 - protein, 435 aa, Vibrio coralliilyticus
  misc_feature (1)..(435): tr|A0A2A2MMV7|A0A2A2MMV7_9VIBR Isochorismate synthase M enF OS=Vibrio coralliilyticus OX=190893 GN=menF PE=3 SV =1
MSHFHQAVIELIERVKDAEDGVNRLVQVLEEKPDFAFIDWLEAQPIFPKFYWQSRDTREEVVALGQLHTFVDPAPAYTILADDQRIWGGRSFDGQTEKNRRCMSSFFFLPQIELIRFDNCWSLAVNLTADKHRTLAGLSKLKVEAGSLLPVSAQIKSISHIPEKPQWSELVEKVLTGIENDDFKKVVLARRTSVQMDSTVSAAQLLKSSYLQNHHSFHFMLSLDKKHSFIGSTPERLYARQGQELYTEALAGTIGRGDNASHDMELANWLSQDSKNLNENQYVVDDIIDRLTPHSEHVEVEQEARLVRLRKVQHLKRSIHAHLKPGINGVQLLGALQPTAAVAGLPRKESMAFIQNNEPFARGWYAGSMGFISHQRAEFCVAIRSALILGEEVQLFAGAGIVPGSVADNEWQELDKKMSTLLSLITDIPPLGVAS

SEQ ID NO: 95093 - protein, 435 aa, Vibrio crassostreae
  misc_feature (1)..(435): tr|A0A4V2RUL2|A0A4V2RUL2_9VIBR Isochorismate synthase M enF OS=Vibrio crassostreae OX=246167 GN=menF PE=3 SV=1
MSHFQQTISALIERVQNAQASEVRCVEVLTQKPSFAFIEWLHAQPLFPKFYWQSRDTREEVVALGQLHTFSDPAPAYAILGEDQRIWGGRSFDGHTAKNRRCMESFFFLPQVELIRFDNTWSLAVNLSPDRVASINALNKLSVEAAILAPLSAHIEEINHVPEREQWGGLVEKVLKGISDEEYKKVVLARKTTLQLDAPICAAQLLKASYLQNHHSFHFMLVLDSKHSFIGSTPERLYSRHGTELDTEALAGTIGRGENATEDMELANWLSQDTKNLNENQYVVDDIIERLTPHSQSVHVEKEARLVRLRKVQHLKRNIHAQLNNGVNGVQLLAALQPTAAVAGLPRKEAMDFILEHEPFARGWYAGSVGYISHQRAEFCVAIRSALVVNDQVQLFAGAGIVPGSVAEHEWQELNKKMSTLLSLISDHPPLGVAS

SEQ ID NO: 95094 - protein, 435 aa, Vibrio diabolicus
  misc_feature (1)..(435): tr|A0A2L2K3A8|A0A2L2K3A8_9VIBR Isochorismate synthase M enF OS=Vibrio diabolicus OX=50719 GN=menF PE=3 SV=1
MSQFHQAVKRIIERVQQAEGNQTRLVEPLSEKPNFSFIDWLDAQPLFPKFYWQSRDTREEVVALGQLHAFVEPGPAYTILGEGQRVWGGRSFDGQHEKNRRCMPSFFFLPQIELIRFDQQWSLAVNISEDKARTLAGLHKLVCEVATLAPISSHIRSIVHTPSQPQWNELVHKVLTGIKNDDFKKVVLARRSTVQLDNTLSAAQLLKASYLNNHHSFHFMLSLDSKHSFMGSTPERLYSRVGHELHTEALAGTIGRGDNATHDMELANWLSQDQKNLNENQYVVDDIIDRLSPHSEAVEVEAEASLVRLRKVQHLKRNIHASLKTGINGVQLLSALQPTAAVAGLPRQESMQFILDNEPFARGWYAGSMGYISHERAEFCVAIRSALVLGDQVQLFAGAGIVPGSVAEHEWAELDKKMSTLLTLISDHPPLGVAS

SEQ ID NO: 95095 - protein, 435 aa, Vibrio diazotrophicus
  misc_feature (1)..(435): tr|A0A2J8GSZ2|A0A2J8GSZ2_VIBDI Isochorismate synthase M enF OS=Vibrio diazotrophicus OX=685 GN=menF PE=3 SV=1
MSKFYQAVAQLIEQVSNARENDVRFVQELADKPPFAFIDWLEAQPIFPKFYWQSRDTRDEVVALGQLYTFTEPEPAYAILGEGQRVWGGRSFDGRTEKNRYCMASFFFLPQIELIRFDDKWSLAANVSHEKHRTLATLNKLLVDITPIRTLQSDIVHVTHTPDENGWNHLVEKVLHGIEQKEFKKVVLARKTSLQLDSNLSAAQLLKASYAQNHHSFHFLLSIDTKHSFMGSTPERLYYRQGSELQTEALAGTIGRGHNASQDLELANWLTQDTKNLNENQLVVDDIVERLEPHSHQVFVEEEARLVRLRKVQHLKRSIRAELKQGINGIQLLSALQPTAAVAGLPRKEALDFITQNEPFARGWYAGSMGYFSHQKAEFCVAIRSALVLEKEVQLFAGAGIVPGSVAEHEWQELDKKMSTLLSLISDKLPLGVAS

SEQ ID NO: 95096 - protein, 435 aa, Vibrio europaeus
  misc_feature (1)..(435): tr|A0A178JGR8|A0A178JGR8_9VIBR Isochorismate synthase M enF OS=Vibrio europaeus OX=300876 GN=menF PE=3 SV=1
MSYFHQAVAELIERVKEAEDGVNRLVQVLEEKPDFAFIDWLEAQPLFPKFYWQSRDTREEVVALGQLHTFVEPAPAYTILADDQRIWGGRSFDGHTGKNRRCMSSFFFLPQIELIRFDQQWSLAVNLNAEKHRTLASLYKLQLEVSPILPVSSHIETIQHTPEKEQWSQLVDKVLTGIKNDEFKKVVLARKTEVNLDRPLCASQLLKASYLQNHHSFHFLLSLDKKHSFLGSTPERLYARQGQELYTEALAGTIGRGSNASQDMELANWLSNDIKNLNENQYVVDDIVERLTPHSEHVEVEQEARLVRLRKVQHLKRSIHAHLNKGVNGVQLLSALQPTAAVAGLPREESMAFIQEHEPFARGWYAGSMGFISHQRAEFCVAIRSALVLNDQVQLFAGAGIVPGSIAEHEWQELDKKMSTLLSLISDNPPLGVAS

SEQ ID NO: 95097 - protein, 434 aa, Vibrio ezurae
  misc_feature (1)..(434): tr|U3CQF4|U3CQF4_9VIBR Isochorismate synthase MenF OS=V ibrio ezurae NBRC 102218 OX=1219080 GN=menF PE=3 SV=1
MSHFANAIQQLAQHIESAPIDACRIEVPVEEVCTDSVLPWMENQPLFPKFYWQSRDTTEEVVALGQARTFNEINPAYSMLNHKQRIWGGYAFPYKDNKGRCLSSFFFLPHIELVRRNQDWFLAANLMEDRDAVRRAVYLLCADTLPLPNSLPAVKNVTHTPRKALWNNTVELALQAITTTELKKVVLARQTTIKLDSALKGVELLALSRKQNRHSFHFLLQLEQGHSFIGSTPERLYSRRGQLIETEALAGTIGRHSHPAQDLELANWLINDKKNLQENQYVVDDIVERLTPFCNNVEVDDEARLVKLRRVQHLKRHIQAELSKHADKSKLLEALQPTAAVAGLPRHLALEFIEQNEPFSRAWYSGSVGYISDQNAEFCVAIRSALVQDDNLHLFAGAGIVPGSEAEHEWQELDKKMSTLLSLITEQSVLEQAS

SEQ ID NO: 95098 - protein, 393 aa, Vibrio fluvialis
  misc_feature (1)..(393): tr|A0A1L9L0H6|A0A1L9L0H6_VIBFL Isochorismate synthase D hbC OS=Vibrio fluvialis OX=676 GN=dhbC PE=4 SV=1
MKREVIGYTKMANELLDNELSSSPFFFASPNNTMMGIGVQEERLQTLPFSELADVANNMLKNAKTSESDNPVLFGVVPFNQENMTRFVIPKTLYISSSTRASHTSASSAPQARLISSPSGHYYKQGVHDLLGMFANQELSKVVLSRAIEVATETDIQQQALLRNLLSINAKGYTFAAQIGDNQKLMGASPELLVAKKGSHLISNPLAGSRPRSESEQQNQASIQSLLNTGKDLHEHGLVVEEVERVMSKYCCNLYTPMVPSVIETQTMLHLSTQLEGQVLDPAINVLQVAAELHPTPAVCGYPREKAYEAIKRLEQFDRGYFTGMVGWCDSRGNGEWVVTIRCAEVQPRRMKVFAGAGIVNESQPQSELDETGAKMNTILKAAGIQLNEMLTA

SEQ ID NO: 95099 - protein, 435 aa, Vibrio fortis
  misc_feature (1)..(435): tr|A0A066UXD6|A0A066UXD6_9VIBR Isochorismate synthase M enF OS=Vibrio fortis OX=212667 GN=menF PE=3 SV=1
MSHFQQTICALIERVQNAQAGEVRCVEVLKQKPPFAFIEWLHAQPLFPKFYWQSRDTREEVVALGQIHTFSDPAPAYAILGDDQRIWGGRSFDGHTEKNRRCMESFFFLPQIELIRFDDKWSLAVNLTPDRVASINALKKLSVDAAILAPLSAHIEHIDHLPEQPEWNGLVEKVLTGIDNNDFKKVVLARKTTVHLDEPICAAQLLKASYQKNHNSFHFMLVLDSKHSFIGSTPERLYSRHGTELDTEALAGTIGRGKNASSDMELANWLTQDQKNLNENQYVVDDIIDRLTAYSHSVNVEKEARLVRLRKVQHLKRHIHAQLHAGVNGVQLLGTLQPTAAVAGLPRKESMDFILKHEPFARGWYAGSVGFISHQRAEFCVAIRSALIVGDQVQLFAGAGIVPGSVAEHEWQELNKKMSTLLSLISEHPPLGVAS

SEQ ID NO: 95100 - protein, 435 aa, Vibrio furnissii
  misc_feature (1)..(435): tr|A0A0Q2XZF5|A0A0Q2XZF5_VIBFU Isochorismate synthase M enF OS=Vibrio furnissii OX=29494 GN=menF PE=3 SV=1
MSNFHQAIARLIEQINDARDNDVRFTQELAEKPPFAFIDWLEAQPVFPKFYWQSRDTREEVVALGQLYTFSDPAPAYTILGDDQRVWGGRSFDGQTDKNRRCMSSFFFLPQVELIRFDQTWTLAANVSHERHRTLATLQKLLTDVTPLRALNCEVTDVQHAPTESGWATLVDQVLDGITHNAFKKVVLARQTSLTLDRPISAAQLLKASYDQNHNSFHFLLALDAKHSFMGSTPERLYFRQGLDLHTEALAGTIGRGQNATQDMALSNWLAQDTKNLNENQYVVDDIVDRLTPHAETVTVEQEAHLVRLRKVQHLKRRIHAQLNAGVNGVQLLSALQPTAAVAGVPRKEAFDFITQHEPFARGWYAGSMGYFSHQQAEFCVAIRSALVLEQEVQLFAGAGIVPGSVAEYEWQELDKKMSTLLSLITDRLPLGVAS

SEQ ID NO: 95101 - protein, 435 aa, Vibrio galatheae
  misc_feature (1)..(435): tr|A0A0F4NKX0|A0A0F4NKX0_9VIBR Isochorismate synthase M enF OS=Vibrio galatheae OX=579748 GN=menF PE=3 SV=1
MSYFHQAVAELIERVKEAQDGVHRLVQVLEEKPDFAFIDWLEAQPLYPKFYWQSRDTREEVVALGQLHTFVEPAPAYTILGEDQRIWGGRSFDGQTDKNRRCMASFFFLPQIELIRFDQHWSLAVNLNTEKHRTLASLYKLQYEVKALLPVSSHIDTIQHTPEKAQWSQLVDKVLSGIDNQQFKKVVLARKTEVHLDRPLCASQLLKASYEQNHHSFHFLFSLDKKHSFVGSTPERLYARQGQELYTEALAGTIGRGSNASHDMELANWLSNDAKNLNENQYVVDDIIDRLTDYSEQIEVESEARLVRLRKVQHLKRSIHAHLHKGVNGVQLLGALQPTAAVAGLPREASMEFIQENEPFVRGWYAGSMGFISLQRAEFCVAIRSALVLEDQVQLFAGAGIVPGSVAEHEWQELDKKMATLLSLISDNPPLGVAS

SEQ ID NO: 95102 - protein, 435 aa, Vibrio gazogenes
  misc_feature (1)..(435): tr|A0A1Z2SIR2|A0A1Z2SIR2_VIBGA Isochorismate synthase M enF OS=Vibrio gazogenes OX=687 GN=menF PE=3 SV=1
MSYFYQAVNQLIHQIHQASPQVSRCQQALDFPPHFALPDWLAAQTLFPKFYWQDRDSREEVVALGACVTFSDPAPAYQVISDSQRIWGGRSFDGGTTKNPHCKEAFFFLPQIELIREGHSWFLCANLTQARDTTIQALRQLQYEIPALPPIATEVLSVDHAPQRAQWCQLVEQALSAMTQQQFDKVVLARQSTFQLTQSIQAAQLLKESRRQNDQSFHFLLAIDQRHSFVGSTPERLYQRHGEALFTEALAGTIGRSDDIQQDQALSDWLIHDDKNVTENQYVVDDIVDRLTPLARSVDVGAETELVKLRRVQHLKRHITAELNPTINGVQLLGALQPTAAVAGLPRQAAKTFIERYEPFCRGWYAGSIGYISHQRAEFCVAIRSALVMDKQVKLFAGAGIVSGSVAEHEWLELDRKMSTLLSLITEISPEEVVS

SEQ ID NO: 95103 - protein, 440 aa, Vibrio genomosp.
  misc_feature (1)..(440): tr|A0A1E5D242|A0A1E5D242_9VIBR Isochorismate synthase M enF OS=Vibrio genomosp. F6 str. FF-238 OX=1191298 GN=me nF PE=3 SV=1
MYEVDLSHFYQAIQTLVERVKSSTPKEVRLVERLDEKPPFVFIDWLEAQPIFPKFYWQSRDTREEVVALGKVHTFSDPAPAYTILGEGQRIWGGRSFDGHTEKNRRCMESFFFLPQIELIRYDDQWSLAVNLPSEKQTLINALNKIVCDVPSLLPLSAQIEHTEHTPSKAIWADLVERVLSGIEADDFKKVVLARKTVLKLDAPICSAQLLKASYEQNHHSFHFMMSLDSKHSFMGSTPERLYSRFGQELHTEALAGTIGRGKNATQDMELANWLSQDAKNLNENQYVVDDIVERLTQHSETVNVQQEARLVRLRKVQHLKRSIHAQLKPNTNGVQLLGALQPTAAVAGLPRAEAMQFIQENEPFARGWYAGSVGYISHQKAEFCVAIRSALIVDNQVQLFAGAGIVPGSNAEHEWQELNKKMATLLSLISDNPPLGVAS

SEQ ID NO: 95104 - protein, 434 aa, Vibrio halioticoli
  misc_feature (1)..(434): tr|V5FB96|V5FB96_9VIBR Isochorismate synthase MenF OS=V ibrio halioticoli NBRC 102217 OX=1219072 GN=menF PE=3 S V=1
MSYFANAIKQLAQHVETAPIDACRIEVPVEEVCVDSVLPWMENQPIFPKFYWQSRDTTEEVVALGQARTFNEINPAYSMLNENQRIWGGYAFPYKNKKGRCLKSFFFLPHIELVRRNQDWFLAVNLMQDRDAVRRAVHLLNNDTLSFSTPLPAVTKVTHTPDQALWTRNVDLALESISSSELKKVVLARKTTVKLDSTLKGVELLALSREQNRHSFHFLLQLEEGHSFIGSTPERLYSRRGQLIETEALAGTIGRHSKPSQDLELANWLIHDKKNLQENQYVVDDIVDSLAPFCSNVEVEDEARLVKLRRVQHLKRHIQAELSKHADKSKLLQALQPTAAIAGLPRHLALEFIEQNEPFSRSWYSGSVGYISDQSAEFCVAIRSAMVQGDDLHLFAGAGIVPGSEAEHEWQELDKKMSTLLSLITEQSVLEQAS

SEQ ID NO: 95105 - protein, 435 aa, Vibrio hangzhouensis
  misc_feature (1)..(435): tr|A0A1H6C3B7|A0A1H6C3B7_9VIBR Isochorismate synthase M enF OS=Vibrio hangzhouensis OX=462991 GN=menF PE=3 SV=1
MSHLTKAITQLLEQLERVPQGTKRLEQDLHGAPKTHCIDWLDSQPHFPKFYWQSRDTREEVVALGQLHTFSEPAPAYTILGDRQRIWGGRSFDGHSDKNRRCMSAFFFLPQIELIRYDSGWRLAVNIGMSVDVTIKALKQLVVDTTELPPLSTAILSLDHTPDKAQWSHLVEDVLTGIEQNKFKKVVLARKTAIDLKHSISPAQLLKASYRENHHSFHFLMALSPSLAFVGSTPERLYRRVGQELETEALAGTIGRGSNAAQDMELANWLTQDKKNINENQYVVDDILQSLMPHSEQVHLESELRLVRLRKVQHLKKNIMAQLKKGVNGVQLLQALQPTAAVAGLPRAEALEYIQANEPFARGWYAGSVGYLSHDRAEFCVAIRSALLLKDELQLFAGAGIVPGSIAEHEWQELDKKMSTLLSLIAEQPSFGVAS

SEQ ID NO: 95106 - protein, 406 aa, Vibrio harveyi
  misc_feature (1)..(406): tr|A0A3A1Q7F4|A0A3A1Q7F4_VIBHA Isochorismate synthase O S=Vibrio harveyi OX=669 GN=DS957_004285 PE=4 SV=1
MIMLRNSMGSSTMLTEFLNAHTDDASFFFSSPTVTLLTQGIAAEFSQQVKFSELDTHISKLLESAKEEGNDNPIAVGVIPFSEHNPVHFIVPERLITTSPIRPDKVLDVDGCNDCHPSSIQPIPTPTEYMHSVELATHRCSQENIALDKVVLSRTMQVDTQDEIDRARFLKTLLKQNPGGYTFSTRIGGGHSDAYLMGSSPELLVSRKGPHVCSNPLAGSRRRCENASMNQQQGELMMESSKDLHEHAVVVDAVEKALQPWCHNLYVPMVPSVIETKAMLHLSTRIEGTVSDANTSVLKLASALHPTPAVCGYPTAQAYDFISQVEPFDRGYFTGLVGWVDARGNGEWVVVIRCAEVEKKRIRVYAGAGIVSGSEPQSELEETGNKMRTVLNALGIEIRENMEVVQ

SEQ ID NO: 95107 - protein, 446 aa, Vibrio hepatarius
  misc_feature (1)..(446): tr|A0A0M0I320|A0A0M0I320_9VIBR Isochorismate synthase M enF OS=Vibrio hepatarius OX=171383 GN=menF PE=3 SV=1
MNNNPHAYEADLSYFHQAVTKLIERVKNAGDGEHRLVQILEEKPDFTFIDWLESQPLFPKFYWQSRDTREEVVALGQLHTFVDPAPAYTILSGEQRIWGGRSFDGHTDKNRRCMSSLFFLPQIELIRFDDQLSLAVNLSAEKHRTLAALYKLQFDVSTLSPVSAHVQHIEHTPCKQQWGELVEKVLTGIENDEFKKVVLARKTSVILDESLCASQFLKASYLQNHHSFHFMLSLDKGHSFIGSTPERLYARQGQELYTEALAGTIGRGKNASHDMELANWLANDAKNLNENQYVVDDIVERLTPHSDDVCVEEEARLVRLRKVQHLKRSIHANLKQGVNGVQLLSALQPTAAVAGLPRKESMAFIQKHEPFARGWYAGSMGFISHQRAEFCVAIRSALVLGDEVQLFAGAGIVPGSVAEHEWQELDKKMSTLLSLISDHAPLGVAS

SEQ ID NO: 95108 - protein, 435 aa, Vibrio ichthyoenteri
  misc_feature (1)..(435): tr|F9S2M2|F9S2M2_9VIBR Isochorismate synthase MenF OS=V ibrio ichthyoenteri ATCC 700023 OX=870968 GN=menF PE=3 SV=1
MSYFQQAITELIERVKDAADGVTRLVQVLPTKPDFAFIDWLQAQSMFPKFYWQSRDTREEVVALGQLSTFNDPAPAYAFIQGEQRIWGGRSFDGQSAKNPRCPASFFFLPQIELSRQEQQWSIAVNISESKQQVIDSLQQLNMDIPKLLPVSAHIEHIEHTPTLPQWESLVEKVLDGISENQFKKVVLARQTTLALDSAICAAQLLKSSAQHNQHSFHFMLAQNEQHSFIGSTPERLYCRQGKDLYTEALAGTIGRGNNASHDMELANWLSQDSKNLNENQYVVDDIIDRLKPYSDLVEVESEARLVRLRKVQHLKRSIHAHLNHGVNGVQLLSALQPTAAVAGLPRKESMDFIQQHEPFARSWYAGSMGFISQHRAEFCVAIRSAQIVDDVIQLYAGAGIVPGSIAEHEWQELDKKMSTLLSLISDHPPLGVAS

SEQ ID NO: 95109 - protein, 434 aa, Vibrio inusitatus
  misc_feature (1)..(434): tr|A0A4Y3HWX0|A0A4Y3HWX0_9VIBR Isochorismate synthase M enF OS=Vibrio inusitatus NBRC 102082 OX=1219070 GN=menF PE=3 SV=1
MSHLANAIKQLAQQIESAPSDACRVEVAIEELCADSVLPWMGNQSLFPKFYWQSRDTTEEVVALGQARTFNEINPAYSVLNRGQRIWGGYAFPYKEIKGRCLNSFFFLPHIELVRRKQDWFLAANLMEDRDAVRRAVYRLNSDVMQLSEQLPTVRDVLHTPNKDLWNDNVELALDAIHNGELKKVVLARQSTIKLNSTLQGIELLALSRQQNRHSFHFLFQLEEGHSFIGSTPERLYSRRGQLIETEALAGTIGRHSNPAQDLQLANWLINDKKNLQENQYVVDDIVESLAPFCSNIEVEGEARLVRLRRVQHLKRHIQAELTKHADRGRLLQALQPTAAVAGLPRRLALEFIERHEPFSRAWYSGSVGYISEQSAEFCVAIRSALVQEDNLHLFAGAGIVPGSQAEHEWQELDKKMSTLLSLITEQSVLEQAS

SEQ ID NO: 95110 - protein, 48 aa, Vibrio ishigakensis
  misc_feature (1)..(48): tr|A0A0B8NY49|A0A0B8NY49_9VIBR Menaquinone-specific iso chorismate synthase OS=Vibrio ishigakensis OX=1481914 G N=JCM19231_2817 PE=4 SV=1
MQGKRLSLFAGAGIVPGSHAEHEWQELDKKMSTLLSLITEQSILEQAS

SEQ ID NO: 95111 - protein, 435 aa, Vibrio jasicida
  misc_feature (1)..(435): tr|A0A2S7UQZ6|A0A2S7UQZ6_9VIBR Isochorismate synthase M enF OS=Vibrio jasicida OX=766224 GN=menF PE=3 SV=1
MSQFHQAVNRIIERVQQTEGNQTRLIEPLSEKPNFAFIDWLEAQPLFPKFYWQSRDTREEVVALGQLHSFVEPGPAYTILGEGQRVWGGRSFDGQHEKNRRCMPSFFFLPQIELIRFDQQWSLAVNIAEDKTRTLAGLKKLVSDVPSLAPISSHIRSIDHAPTAPQWNDLVEKVLTGIDNDEFKKVVLARKSTVHLDSTLSAAQLLKASYLNNHHSFHFLLSLDSKHSFMGSTPERLYSRIGHELHTEALAGTIGRGENATQDMELANWLSQDSKNLNENQYVVDDIIERLSPHSESVEVETDPRLVRLRKVQHLKRNIHADLKTGINGVQLLSALQPTAAVAGLPRKESMQFILDNEPFARGWYAGSMGYISHERAEFCVAIRSALILEEQVQLFAGAGIVPGSIAEHEWAELDKKMSTLLSLISDHPPLGVAS

SEQ ID NO: 95112 - protein, 440 aa, Vibrio kanaloae
  misc_feature (1)..(440): tr|A0A1E5DSI4|A0A1E5DSI4_9VIBR Isochorismate synthase M enF OS=Vibrio kanaloae 5S-149 OX=1191299 GN=menF PE=3 S V=1
MDEVDLSHFQQTLSALIERVHNAPASEVRCVEVLTQKPSFAFIEWLHAQPLFPKFYWQSRDTREEVVALGQLHTFSDPAPAYAILGEDQRIWGGRSFDGHTAKNRRCMESFFFLPQVELIRFDNTWSLAVNLSPDRVASINALNKLSVEAAILAPLSAHIEQITHVPEKEQWGSLVNKVLQGISDEEYKKVVLARKTTLQLDAPICAAQLLKASYQQNHHSFHFMLVLDSKHSFIGSTPERLYSRHGIELDTEALAGTIGRGENATEDMELANWLSQDSKNLNENQYVVDDIIERLTPHSQMVHVEKDARLVRLRKVQHLKRNIHAQLNAGINGVQLLAALQPTAAVAGLPRKEAMDFILEHEPFARGWYAGSVGYISHQRAELCVAIRSALVVNDQVQLFAGAGIVPGSVAEHEWQELNKKMSTLLSLISDHPPLGVAS

SEQ ID NO: 95113 - protein, 435 aa, Vibrio lentus
  misc_feature (1)..(435): tr|A0A2N7GXI3|A0A2N7GXI3_9VIBR Isochorismate synthase M enF OS=Vibrio lentus OX=136468 GN=menF PE=3 SV=1
MSHFQQTISALIERVQNAQASEVRCVEVLTQKPSFAFIEWLHAQPLFPKFYWQSRDTREEVVALGQLHTFSDPAPAYAILGEDQRIWGGRSFDGHTAKNRRCMESFFFLPQVELIRFDDTWSLAVNLSPDRVASINALNKLSVEAAILAPLSAHIEQINHVPEREQWGNLVDKVLQGISDEEYKKVVLARRTTLQLDAPICAAQLLKASYLQNHHSFHFMLVLDSKHSFIGSTPERLYSRYGTELNTEALAGTIGRGENATEDMELANWLSQDSKNLNENQYVVDDIIERLAPHSQTVHVEKEARLVRLRKVQHLKRNIHAQLNNGVNGVQLLAALQPTAAVAGLPRKEAMDFILEHEPFARGWYAGSVGYISHQRAEFCVAIRSALIVNDQVQLFAGAGIVPGSVAEHEWQELNKKMSTLLSLISDHPPLGVAS

SEQ ID NO: 95114 - protein, 391 aa, Vibrio mangrovi
  misc_feature (1)..(391): tr|A0A1Y6IXR5|A0A1Y6IXR5_9VIBR Isochorismate synthase E ntC OS=Vibrio mangrovi OX=474394 GN=entC PE=4 SV=1
MTQLIAQPDIIDQFNPADDFVFLSDHQSLIARGNLFRISTPVSDGCDPTGHFQTELKRAFTHAQSAGIKHPIIVGAIPFDTRLPSALYVPQQVDWLSRQQIRIKPSSSPLSGQATQYPDKNTFEQMVRDALTAMQTRQADKIVLSRLIHVDCHTTPDRQSLFASLNEQNPSGYNFHVPLPDGDSLIGASPELLVRKHGSEFTSMPLAGSAKRAADSLADEQIGRQLMSSEKNRHEHQLVIDDIRRCLAPLSHDLDIPSTPVLSQTPILWHLATRIHGIAPPESNALTLASALHPTPALCGVPQENARQLIEAIEPFERQLFGGIVGWADEEGNGEWVIAIRCGRVSQQQISLFAGAGIVPDSDPEQEWYETGTKLSTMLNVLGLTGEGAKQ

SEQ ID NO: 95115 - protein, 47 aa, Vibrio maritimus
  misc_feature (1)..(47): tr|A0A090SKM8|A0A090SKM8_9VIBR Menaquinone-specific iso chorismate synthase OS=Vibrio maritimus OX=990268 GN=JC M19235_4162 PE=4 SV=1
MKDEVQLFAGAGIVPGSVATHEWQELDKKMSTLLSLISDNPSLGVAS

SEQ ID NO: 95116 - protein, 435 aa, Vibrio mediterranei
  misc_feature (1)..(435): tr|A0A3G4VFW5|A0A3G4VFW5_9VIBR Isochorismate synthase M enF OS=Vibrio mediterranei OX=689 GN=menF PE=3 SV=1
MSHLTKAITQLVEKLERAPQGTKRLEQELQGSPKTHGIDWLDAQPHYPKFYWQSRDTREEVVALGQLHTFSEAAPAYTILSENQRVWGGRSFDGHSDKNRRCMSAFFFLPQVELIRFDEGWRLAVNIGMSKEVSIRALKQLVADAKELAPLASDIVSLRHTPEKTQWCDLVDDVLAGIQQDRFKKVVLARKTCVDLKHSISPAQLLKASYAQNHHSFHFLMALSPGHAFVGSTPERLYRRVGQELETEALAGTIGRGGNAAQDMELANWLTQDDKNINENQYVVDDILQSLSPHSDQVHLESELRLVRLRKVQHLKRNILAHLHKGINGVQLLQALQPTAAVAGLPRAEAMQYIQQNEPFARGWYAGSVGYLSHEKAEFCVAIRSALLVKDELQLFAGAGIVPGSIAEHEWQELDKKMSTLLSLISDQPSLGVAS

SEQ ID NO: 95117 - protein, 435 aa, Vibrio metoecus
  misc_feature (1)..(435): tr|A0A0Q0Q255|A0A0Q0Q255_9VIBR Isochorismate synthase M enF OS=Vibrio metoecus OX=1481663 GN=menF PE=3 SV=1
MLHFFQAVAQLMEQIRGAKDHDVRFTQPLAEKPPFALIDWLDAQPIFPKFYWQSRDTREEVVALGQIYTFTDPAPAYAILGDEQRVWGGRSFDGNTEKNPRCMSSFFFLPQIELTRFDEQWSLAVNINSEPQRTLNALQKLLLEVPALRPLTAQVSDVGHTPSLLQWNALVEKVLNGITQQQFKKVVLARKTKLSLDAPISAAQLLQASHAQNHHSFHFLLALDSRHSFMGSTPERLYLRHGQNLETEALAGTIGRGANAAQDMELANWLTHDSKNLNENQLVVDDIIESLAPYADHIHSQHDAQLVRLRKVQHLKKRIDVELKSGVNGVQLLSALQPTAAVAGLPRQSALAFIAEHEPFARGWYAGSMGYFSHAQAEFCVAIRSALVVDKQVQLFAGAGIVPGSVAEHEWQELDKKLSTLLSLITDRLPLGVAS

SEQ ID NO: 95118 - protein, 436 aa, Vibrio metschnikovii
  misc_feature (1)..(436): tr|C9P5K4|C9P5K4_VIBME Isochorismate synthase MenF OS=V ibrio metschnikovii CIP 69.14 OX=675813 GN=menF PE=3 SV =1
MSHFHQAIARLIEQIKNAKDNDVRFVQTLIGPPPFALIDWLEAQPLFPKFYWQSRDGREEVVAVGQLYTFTEPAPAYAILGDNQRVWGGRSFDGQTDKNRRCMSSFFFLPQVEIIRFDQSWSVAANFIAQDRQRTLATLEKLHREVAPLSRLHSQVLQVEHLPKQSHWSELVSRALTSIEQQQFKKVVLARQTRLTLDNPISAAQLLKASIADNQRSFHFLLALDSKHSFIGSTPERLYYRQGQELQTEALAGTIGRGDTAEQDQQLADWLIHDGKNLNENQYVVDDIIERLTPLAEQVEVESHAQLLTLRQVQHLKRDIVAQLKPSINGVQLLSALQPTAAVAGLPRQPALDFITEHEPFARGWYAGSMGYFSHQQAQFCVAIRSALVVENCVQLYAGAGIVPGSIAEHEWQELDKKMSTLLSLITNQPPLGTAL

SEQ ID NO: 95119 - protein, 994 aa, Vibrio mimicus
  misc_feature (1)..(994): tr|D2YGK3|D2YGK3_VIBMI Multifunctional fusion protein O S=Vibrio mimicus VM603 OX=671074 GN=menD PE=3 SV=1
MEQIRGAKDHDVRFTQPLADKPPFALIDWLDAQPIFPKFYWQSRDTREEVVALGQVYTFTDPAPAYAILGDDQRVWGGRSFDGHTPKNPRCMSSFFFLPQIELTRFDNHWSLSVNLNNEPQRTLSALQKLLLEVPTLRSMTAEVNTVEHTPTLPQWNDLVEKVLSGITQQQFKKVVLARKTKLSLDAPISAAQLLKASHAQNHHSFHFLLALDSRHSFMGSTPERLYLRHGQTLETEALAGTIGRGMNAAQDMELANWLAHDSKNLNENQLVVEDIIESLTPYAEQIHSQSEAQLVRLRKVQHLKKRIDAGLKSGINGVQLLSVLQPTAAVAGLPRQSALAFIAENEPFARGWYAGSMGYFSHAQAEFCVAIRSALVVDKEVQLFAGAGIVPGSIAEHEWQELDKKALYFTELDYRPFTAGSGLMNHDQALLNRLWSRVLLEELSRLGVTQVCVAPGSRSTPLTLEAHANAAFTLHTHYDERGLGFMALGLAKASQQPVAVIVTSGTAVANLLPAIAESKLTGERLVVLTADRPPELVGCGANQAIVQSGIFSHHVNATLDLPSPAIHHPLTWLLTSIDNVMTRQALLGGSVHINCPFPEPLYSAGDEAIYQPYLASVQRWREHQRPFTERHQSLAQSVPSSLDGFLVKGVVIVGSLTSDEAQAAQRFAQAMGWPLLCDPQSGISSEWAHFDLWLQHQPARDVLNQCEVVVQFGSRIVSKRLAQWLANWCGQARGEYHYVSPQTERNNPWHAMQQQWVCDIPNWVEALLSKRLAGQNTQQGWADELTRYAQSVRQLAQLHFSSSALSEVALALDLTERAMQADLFLGNSLIVRLVDMFSALDGREVFSNRGASGIDGLVATASGVQRARQKPLFMLMGDTSLLYDLNSLALMRNPPQPTVIVVTNNDGGAIFDLLPVPSEQREALYQMPHGMDFAHAAQQFGLAYCSAQTLEHYQTLVEEHFAQGVGTLLIEVKTPPQQASMHIKQLTSQLHAL

SEQ ID NO: 95120 - protein, 435 aa, Vibrio mytili
  misc_feature (1)..(435): tr|A0A0C3DL68|A0A0C3DL68_9VIBR Isochorismate synthase M enF OS=Vibrio mytili OX=50718 GN=menF PE=3 SV=1
MSEFHQAVTKIIERVQQTQGNPIRLVEPLREKPNFSLIDWLDAQPLFPKFYWQSRDTREEVVALGQLHTFVEPSPAYAILGEGQRIWGGRSFDGQHEKNRRCMRSFFFLPQIELIRFDQQWSLAVNVSSDKARTLAGLKKLLGDVMSVAPISVHIRSVVHSPSQPQWTQLVDKVLKGIENNAFKKVVLARRSTLQLDTELSAAQLLKASSQSNHHSFHFLMSLDSKHSFMGSTPERLYSRVGCELETEALAGTIGRGENAIQDMELANWLSKDAKNLNENQYVVDDIIERLSPHSEVVDVEKEPRLVRLRKVQHLKRSIHASLKADINGVQLLSALQPTAAVAGLPREASMQFILDNEPFARGWYAGSMGYISHERAEFCVAIRSALVQGEQVHLFAGAGIVPGSVAEHEWAELDKKMSTLSTLISDHPPIGVAS

SEQ ID NO: 95121 - protein, 435 aa, Vibrio natriegens
  misc_feature (1)..(435): tr|A0A1B1EBH9|A0A1B1EBH9_VIBNA Isochorismate synthase M enF OS=Vibrio natriegens OX=691 GN=menF PE=3 SV=1
MSQFHQAVQRIIKRVQKIQGNPMRLVEPLGEKPHFSLIDWLDAQPLFPKFYWQSRDTREEVVALGQLHSFVDPGSAYTILGEGQRVWGGRSFDGQHEKNRRCMTSFFFLPQIELIRFDEQWSLAVNVAEDTSRTLAGLHKLACDVAALTPISTHIRLIEHTPTQPEWGDLVDKVLNGIENDDFKKVVLARRSTLHLDRELSAAQLLKASASQNHHSFHFLFSLDRKHSFMGSTPERLYARVGHELHTEALAGTIGRGDNATHDMELANWLSQDLKNLKENQYVVDDIVERLSPHSESVEVETEPRLVRLRKVQHLKRNIHASLKAGINGVQLLSALQPTAAVAGLPRQESMQFILENEPFARGWYAGSMGYISHERAEFCVAIRSALVLGDQVQLFAGAGIVPGSVAEHEWAELDKKMSTLLTLISEHPPLGVAS

SEQ ID NO: 95122 - protein, 435 aa, Vibrio navarrensis
  misc_feature (1)..(435): tr|A0A099LRP1|A0A099LRP1_9VIBR Isochorismate synthase M enF OS=Vibrio navarrensis OX=29495 GN=menF PE=3 SV=1
MSYFHQAIGQLIERVKNAGEDESRLIEPIDTALKFTLIDWLEAQPIFPKFYWHSRDGREQVVALGQLHTFTEPAPAYAILAPGQRVWGGRSFDGLSEKNRRCMSSFFFLPQIELLQQDGKLSLAVNLGAERSRLLASLRKLVCDVPLLAPLAAHIGHIDHLPSQDQWQSLVDKVLHGIEQNAFKKVVLARKTSVQLDTPLCASQLLKASAQHNHHSFHFMLSLDRKHSFIGSTPERLYLRHDRELHTEALAGTIGRGVNATHDLELANWLAQDAKNLNENQYVVDDIVERLTPHAETVQVEAEPRLVRLRKVQHLKRDIHAHLKEGINGVQLLSALQPTAAVAGLPRQASMQFILDNEPFSRGWYAGSVGYLSHDKAEFCVAIRSALLVDDELQLFAGAGIVPGSIAKHEWAELDKKMSTLLSLIAEYPPLGVAS

SEQ ID NO: 95123 - protein, 435 aa, Vibrio neocaledonicus
  misc_feature (1)..(435): tr|A0A4P8FY07|A0A4P8FY07_9VIBR Isochorismate synthase M enF OS=Vibrio neocaledonicus OX=1208308 GN=menF PE=3 SV =1
MSQFHQAVKRIIERVQQSEGNQTRLVEPLSEKPNFSFIDWLDAQPLFPKFYWQSRDTREEVVALGQLHAFVEPGPAYTILGEGQRVWGGRSFDGQHEKNRRCMPSFFFLPQIELIRFDQQWSLAVNISEDKARTLAGLNKLVCEVAALAPISSHIRSIVHTPSQPQWNELVHKVLTGIENDDFKKVVLARRSTVQLDNTLSAAQLLKASYLNNHHSFHFMLSLDSKHSFMGSTPERLYSRVGHELHTEALAGTIGRGDNATQDMELANWLSQDQKNLNENQYVVDDIIDRLSPHSEMVEVEAEPSLVRLRKVQHLKRNIHASLRAGINGVQLLSALQPTAAVAGLPRQESMQFILDNEPFARGWYAGSMGYISHERAEFCVAIRSALVLGDQVQLFAGAGIVPGSVAEHEWAELDKKMSTLLTLISDHPPLGVAS

SEQ ID NO: 95124 - protein, 446 aa, Vibrio neptunius
  misc_feature (1)..(446): tr|A0A0F4P5N7|A0A0F4P5N7_9VIBR Isochorismate synthase M enF OS=Vibrio neptunius OX=170651 GN=menF PE=3 SV=1
MNKNPQAYEADLSHFHQAVTELIERVKDAEDGVNRLVQVLEEKPDFAFIDWLESQPLFPKFYWQSRDTREEVVALGQLHTFVDPAPAYTILADEQRIWGGRSFDGQTEKNRRCMSSFFFLPQIELIRFDNRWSLAVNLTADKHRTLAGLSKLKIEVGALRPVSAQIKSISHIPEKPQWSELVEKVLTGIENNDFKKVVLARRTSIHMDSTVSAAQLLKSSYLQNHHSFHFMLSLDKKHSFIGSTPERLYARQGQELYTEALAGTIGRGDNASHDMELANWLSQDSKNLNENQYVVDDIIDRLTPHSEHVEVEQEARLVRLRKVQHLKRSIHAHLKSGINGVQLLAALQPTAAVAGLPRKASMDFIQNNEPFARGWYAGSMGFISHQRAEFCVAIRSALILGEEVQLFAGAGIVPGSVADNEWQELDKKMSTLLSLIADIPPLGVAS

SEQ ID NO: 95125 - protein, 446 aa, Vibrio nereis
  misc_feature (1)..(446): tr|A0A0M0HNP0|A0A0M0HNP0_VIBNE Isochorismate synthase M enF OS=Vibrio nereis OX=693 GN=menF PE=3 SV=1
MNNNPHAYEADLSYFHQAVSELIERVKVVEDGVTRLVQILEEKPDFAFIDWLEAQPLFPKFYWQSRDTREEVVALGQLHTFVDPAPAYAILSGDQRVWGGRSFDGHTDKNRRCMSSLFFLPQIELIRFDDQFSLAVNLTAEKHRTLSALYKLQYEVSALSPVSAQVEHIEHTPSKAHWGELVEKVLTGIDNNEFKKVVLARKTSVMLDESLCASQFLKASYLQNHHSFHFMLSLDKKHSFIGSTPERLYARQGQELYTEALAGTIGRGANASQDMELANWLANDSKNLNENQYVVDDIIERLTPHSETVCVEEEARLVRLRKVQHLKRSIHAHLKKGVNGVQLLSALQPTAAVAGLPRKESMAFIQQHEPFARGWYAGSMGFISHQRAEFCVAIRSALVLGEEVQLFAGAGIVPGSVAEHEWQELDKKMSTLLSLISDHAPLGVAS

SEQ ID NO: 95126 - protein, 393 aa, Vibrio nigripulchritudo
  misc_feature (1)..(393): tr|U4KC41|U4KC41_9VIBR Vibriobactin-specific isochorism ate synthase OS=Vibrio nigripulchritudo OX=28173 GN=vib C PE=4 SV=1
MKREVIGYSKMESELLDSELLSSPFFFASPNNTMMGSGVENEFHEPIEFSKLAEKANEMLQAAKKSESDNPVLFGVVPFNEENPTKFIVPEKLYVSSSTRALRPNSQSSSDARVISSPSGHHYKQGVSDLLDMFANTELSKVVLSRAIEVATDTDIQQQALLRNLLSINSKGYTFAANISDEQKLMGASPELLVAKKGSHLISNPLAGSRPRSDSDEQNQSSVDSLLNTNKDLHEHGLVVEEVERVMSQYCYNLYTPMIPSVIETKTMLHLSTVLEGQVNDPAINVLKVAAELHPTPAVCGYPREKAYDAIRKLEQFDRGYFTGMVGWCDSRGNGEWVVTIRCAEVQKRQMKVFAGAGIVDESQPQSELDETGAKMNTILTAAGIQLKDMLTA

SEQ ID NO: 95127 - protein, 446 aa, Vibrio orientalis
  misc_feature (1)..(446): tr|C9QIL5|C9QIL5_VIBOR Isochorismate synthase MenF OS=V ibrio orientalis CIP 102891 = ATCC 33934 OX=675816 GN=m enF PE=3 SV=1
MNNNFDAYEADLSYFHQAVTELIERVKDAEDGTTRLVQVLEEKPDFPFIDWLDAQPLFPKFYWQSRDTREEVVALGQLHTFVDPAPAYAILADDQRIWGGRSFDGHTGKNRRCMSSFFFLPQVELIRFDDKWSLAVNLNAEKHRTLAGLYKLQLDVAPLPPISSHIESIQHVPEKEQWSELVEKVLAGIENDDFKKVVLARKTTVSLDQPLCASRLLKSSYLSNHHSFHFLLSLDKDHSFIGSTPERLYLRQGQELYTEALAGTIGRGSNASQDMELANWLAGDSKNLNENQYVVDDIIERLSPYSDDVVVEQEARLVRLRKVQHLKRSIHAHLHKGTNGVQLLGALQPTAAVAGLPRQESMDFIQQHEPFARGWYAGSMGFISHQRAEFCVAIRSALVLDGEVQLFAGAGIVPGSVAEYEWQELDKKMSTLLSLISDHPPLGVAS

SEQ ID NO: 95128 - protein, 435 aa, Vibrio owensii
  misc_feature (1)..(435): tr|A0A0C1WAZ7|A0A0C1WAZ7_9VIBR Isochorismate synthase M enF OS=Vibrio owensii CAIM 1854 = LMG 25443 OX=1229493 GN=menF PE=3 SV=1
MSQFHQAVKRIIERVQQTEGNQTRLVEPLSEKPNFAFIDWLEAQPLFPKFYWQSRDTREEVVALGQLHSFVEPGPAYTILGEGQRVWGGRSFDGQHEKNRRCMPSFFFLPQIELIRFDQQWSLAVNISEDKTRTLAGLKKLVCDVPMLAPISSHIRSIDHAPTEPQWNDLVEKVLTGIENDDFKKVVLARKSTVRLDSTLSAAQLLKASYLNNHHSFHFLLSLDSKHSFMGSTPERLYSRVGNELHTEALAGTIGRGDNATQDMELANWLSQDSKNLNENQYVVDDIVDRLSPHSESVEVEKEPRLVRLRKVQHLKRNIHADLKAGINGVQLLSALQPTAAVAGLPRKESMQFILDNEPFARGWYAGSMGYISHERAEFCVAIRSALILGDQVQLFAGAGIVPGSIAEHEWAELDKKMSTLLSLISDHPPLGVAS

SEQ ID NO: 95129 - protein, 394 aa, Vibrio palustris
  misc_feature (1)..(394): tr|A0A1R4B874|A0A1R4B874_9VIBR Isochorismate synthase D hbC OS=Vibrio palustris OX=1918946 GN=dhbC PE=4 SV=1
MKREVIGYNELSNVVLKQNLDSAPFFFASPSATMLGVGIEDTFTGVIPFAQLAEKATSMLQKAKKNEQDNPVLFGIVPFSEDNPSRFLIPDHLHVSSSTRAEQHAQPAYHAPGKLVSAPTGEHYKQAVQDAIGLFSNTDLSKVVLSRALEVGTDEDIDQLRLLKNMLAINSAGYTFAASLASGNKMMGASPELLVAKKGSNITSNPLAGSLPCSDDVAVNAMRSEQLLNSAKDLYEHSFVVEEVERVLNKYCHGLYTPMAPSVIKTKTMLHLSTLLEGQVDNPDISVLQLASDLHPTPAVCGYPRQAAYQAIRNIEQYDRGYFTGMVGWCDSRGNGEWVVTIRCAEVQKRSMKVFAGAGIVSQSQPQSELDETGAKMSTILSAAGIELNDMLVA

SEQ ID NO: 95130 - protein, 436 aa, Vibrio panuliri
  misc_feature (1)..(436): tr|A0A1Q9HJE7|A0A1Q9HJE7_9VIBR Isochorismate synthase M enF OS=Vibrio panuliri OX=1381081 GN=menF PE=3 SV=1
MSYFQQAITELIERVKDAKDEATRLVQVLEYKPDFAFIDWLQAQPLFPKFYWQSRDTREEVVALGQLKTFKEPAPAYAYLSGSQRIWGGRSFDGQSAKNPHCPASFFFLPQVELVREEHTWSLVANIVAGSKSCVIKSLQQLRCEVPRLLPLSAHIDHIEHTPTQPEWNRLVEKVLQGIDADEYKKVVLARRTTLGLHSPICAAQLLKSSSEHNQHSFHFMLAQNDRHSFIGSTPERLYYREGKDLYTEALAGTIGRGDNATHDMALANWLTQDSKNLNENQYVVDDIIDRLTPYSDLVEVEPEARLVRLRKVQHLKRSIHAHLNDGVNGVQLLGALQPTAAVAGLPRRESMDFIQQHEPFERSWYAGSMGFISLQRAEFCVAIRSAQVVDDEISLYAGAGIVPGSVAEHEWQELDKKMATLLSLISDQPPLGVAS

SEQ ID NO: 95131 - protein, 435 aa, Vibrio parahaemolyticus
  misc_feature (1)..(435): tr|A0A4S3T8F2|A0A4S3T8F2_VIBPH Isochorismate synthase M enF OS=Vibrio parahaemolyticus OX=670 GN=menF PE=3 SV=1
MSEFHQAVKRIIERVQHTEGNQVRLVEPLSEKPNFAFIDWLDAQPLFPKFYWQSRDTREEVVALGQLHSFVEPGPAYTILGEGQRVWGGRSFDGQHEKNRRCMPSFFFLPQIELIRFDQQWSLAVNLTEDKARTLAGLRKLICDVAALPPISSHIRSIVHTPIKSEWDALVHKVLTGIENDEFKKVVLARRSTVQLDNTLSAAQLLKASYLNNHHSFHFLLSLDSKHSFMGSTPERLYSRVGHELHTEALAGTIGRGDNATHDMELANWLSQDSKNLNENQYVVDDIVERLSPHSEMVEVETEPRLVRLRKVQHLKRNIHASLKTGTNGVQLLSALQPTAAVAGLPRKESMQFILDNEPFARGWYAGSMGYISHERAEFCVAIRSALVLGDQVQLFAGAGIVPGSVAEHEWAELDKKMSTLLTLISDHPPLGVAS

SEQ ID NO: 95132 - protein, 393 aa, Vibrio pectenicida
  misc_feature (1)..(393): tr|A0A3R9EDU7|A0A3R9EDU7_9VIBR Isochorismate synthase O S=Vibrio pectenicida OX=62763 GN=EJA03_18320 PE=4 SV=1
MKREVVGFSKMANEMFTNKLLDSPFFFASPNNSMLGVGTKIRLNQSIPFSQLASTAQELLEKAKTKDNDNPLLFATVPFNENTPTQFCIPETLYVSSSTRSQRNYQNLSQTAKVVSPPSGNEYKNGVSRLLNLFDTTELSKVVLSRSIKIATDKKIDQCSLLRNLLSINTNGYTYCSQISEHSKLMGASPELLLSKKGSHVLSNPLAGSRPKSTCEIENQSACISLLDTQKDLNEHSFVVEDVEKVLSRYCHNLYTPMVPSVIETETMLHLSTVLKGEIDNPHTNSLQIAADLHPTPAVCGFPRQSAYAAIKEIERFERGYFTGMVGWCDARGNGEWVVTIRCAEVSQKAMSIYAGAGIVNESSPQSELEETGAKMNTILRAAGIQVDELLTA

SEQ ID NO: 95133 - protein, 393 aa, Vibrio penaeicida
  misc_feature (1)..(393): tr|A0A3S0VAP8|A0A3S0VAP8_9VIBR Isochorismate synthase O S=Vibrio penaeicida OX=104609 GN=EKN09_07050 PE=4 SV=1
MKREVIGYSKMECELLDSELLSSPFFFASPDNTMMGKGIEIEFHQSIPFTQLAAQANKMLQAAKKSDSDNPVLFGVVPFNEENPTKFIIPEKLYVSSSTRALRPNSQSPSDARVISSPSGNHYKQGVSDLLDMFANTELSKVVLSRAIEVATDTDIQQQALLRNLLSINSKGYTFAANISKDQKLMGASPELLVAKKGSHLISNPLAGSRPRSESQELNKASVDSLLNTNKDLYEHGLVVEEVERIMSKYCYNLYTPLIPSVIETKTMLHLSTVLEGQVNDPAINVLKVAAELHPTPAVCGYPREKAYDAIRKLEQFDRGYFTGMVGWCDSRGNGEWVVTIRCAEVQKRQMKVFAGAGIVDESQPQSELDETGAKMNTILTAAGIQLKDMLTA

SEQ ID NO: 95134 - protein, 436 aa, Vibrio ponticus
  misc_feature (1)..(436): tr|A0A3N3DY67|A0A3N3DY67_9VIBR Isochorismate synthase M enF OS=Vibrio ponticus OX=265668 GN=menF PE=3 SV=1
MSYFQQAITELIERVKDAKDEVTRLVQVLEYKPDFAFIDWLQAQPLFPKFYWQSRDTREEAVALGQLRTFDDPAPAYAYLSGAQKIWGGRSFDGQSAKNPDCPASFFFLPQIELVREEQTWSLVVNLVEGAKPRVLKSLQQLRCEVPKLLPLSAHINHIEHTPTEPEWHALVEKVLAGIEADEFKKVVLARRTTLELHTPICASQLLKSSSEHNQHSFHFMLAQNERHSFIGSTPERLYFRQGKDLYTEALAGTIGRGDNASHDMALANWLTQDSKNLNENQYVVDDIIDRLKPYSDLVEVEPEARLVRLRKVQHLKRSIHAHLNEGVNGVQLLGALQPTAAVAGLPRRESMQFIQQYEPFERSWYAGSMGFISLERAEFCVAIRSAQVVDDEISLYAGAGIVPGSIAEHEWQELDKKMATLLSLISDHPPLGVAS

SEQ ID NO: 95135 - protein, 435 aa, Vibrio proteolyticus
  misc_feature (1)..(435): tr|U3B8V9|U3B8V9_VIBPR Isochorismate synthase MenF OS=V ibrio proteolyticus NBRC 13287 OX=1219065 GN=menF PE=3 SV=1
MSHFHQALTELIERVKDAKDGQNRLVQVLQEKPNFAFIDWLDAQPIFPKFFWHSRDTREEVVALGQLHTFSDPAPAYSILGQDQRVWGGRSFDGQTPKNRRCMSSFFFLPQIELIRFDEQWSLAVNLSHEPHRTLASLRKLQLDVAPLPPISTHIDSITHTPDQSGWTTLVEKVLQGIEEDAFKKVVLARQTCVALDTPIHAAQLLKASQAENHHSFHFMLALDAQHCFIGSTPERLYARTGQELQTEALAGTIGRGINAAQDMELANWLTQDAKNLNENQYVVDDIIERLAPHSQDVHVEQEARLVRLRKVQHLKRSIHAHLNPGVNGVQLLAALQPTAAVAGLPRKQAMDFIQQHEPFARGWYAGSMGYISHQQAEFCVAIRSALVLKNHIQLFAGAGIVPGSVAEHEWQELDKKMSTLLSLLSDNPPLGVAS

SEQ ID NO: 95136 - protein, 435 aa, Vibrio qinghaiensis
  misc_feature (1)..(435): tr|A0A223MYK6|A0A223MYK6_9VIBR Isochorismate synthase M enF OS=Vibrio qinghaiensis OX=2025808 GN=menF PE=3 SV=1
MSHFHQAIARLIEQINDAKDDDVRFVQILQEAPPFAPIDWLEAQPIFPKFYWQSRDTREEVVALGQLYTFSEAEPAYAILGEDQRVWGGRSFDGHTDKNRRCLPSFFFLPQIELIRCDGQWSLAANVTSERQRSLDALCKLQLEINPLRAMTSHIKQVIHQPNEVQWQQLVNQALDRIEHQVFKKVVLARQTTLSLDKPLSAAQLLKASAEHNHHSFHFLFALDQKHSFMGSTPERLYLRQGQTLYTEALAGTIGRGENASQDMELSHWLTQDSKNLNENQYVVDDIIERLTPHSDSSDVEQEVRLIRLRKVQHLKRGIHVRLKKGVNGVQLLSALQPTAAVAGLPRKAAMDFIQANEPFARGWYAGSVGYFSHQQAEFCVAIRSALLVDNQVQLFAGAGIVPGSVAEHEWQELDKKMATLLSLISDHFPLGVAS

SEQ ID NO: 95137 - protein, 393 aa, Vibrio quintilis
  misc_feature (1)..(393): tr|A0A1M7YX96|A0A1M7YX96_9VIBR Isochorismate synthase D hbC OS=Vibrio quintilis OX=1117707 GN=dhbC PE=4 SV=1
MKRKVIGYDYMDEMIANHSFEECPFFFSSPANTLFGTGVEQSLEQVIPFKELAEKAQQLLNRAKKSEVDNPVLFGLVPFSEGNPTRFIVPQRLYASGTPRALYQSEPAKSKAMLVSSPSGEKYKQGVMDALDRFSSSELSKVVLSRSIEIESEKEIDRSCLLRNLLKVNPCGYTFSASLNGGRSMIGASPELLVAKRGAHVTSNPLAGSRPRAASQAEDEQERQYLLNCTKELHEHQLVVEEVERVLSQHCHNLYTPMVPSVIETNSMLHLSTRLEGHAVNPQISVLQVASELHPTPAVCGFPRQPAYEAICDIEQYDRGYFTGMIGWCDARGNGEWVVTIRCAEVDKRLMKVYAGAGIVTQSRPESELHETGAKMGTILSAAGIELEDMLVA

SEQ ID NO: 95138 - protein, 435 aa, Vibrio renipiscarius
  misc_feature (1)..(435): tr|A0A0C2NML5|A0A0C2NML5_9VIBR Isochorismate synthase M enF OS=Vibrio renipiscarius OX=1461322 GN=menF PE=3 SV= 1
MSYFQQAITELIERVKEATDEVSRLVQVLPKKPDFAFIDWLQAQPLFPKFYWQSRDRNEEVVAIGQLSTFSDPAPAYAFLQGEQRVWGGRSFDGQSAKNPHCPASFFFLPQIELIRHDQEWELAINIGGDKLQAIESLQQLKLIIPQLLPLSAQIKCVEHTPTQPQWAHLVKKVLDGIENNQFKKVVLARETTLELDSAICAAQLLKASAEHNQHSFHFMLAQNERHSFIGSTPERLYSRQGKDLYTEALAGTIGRGKNASQDMELANWLSQDSKNLNENQYVVDDIIERLKPYSDVVEVESEARLVRLRKVQHLKRSIHAHLNHGVNGVQLLSALQPTAAVAGLPRKESMDFIQQHEPFARSWYAGSMGFISQQRAEFCVAIRSAQIVDDAIQLYAGAGIVPGSIAEHEWQELDKKVSTLLSLISDHPSLGVAS

SEQ ID NO: 95139 - protein, 435 aa, Vibrio rotiferianus
  misc_feature (1)..(435): tr|A0A510I7E4|A0A510I7E4_9VIBR Isochorismate synthase M enF OS=Vibrio rotiferianus OX=190895 GN=menF PE=3 SV=1
MSQFHQAVKRIIERVQQTEGNQTRLVEPLSEKPSFAFIDWLEAQPLFPKFYWQSRDTREEVVALGQLHSFVEPGPAYTILGEGQRVWGGRSFDGQHEKNRRCMPSFFFLPQIELIRFDDQWSLAVNISEDKTRTLAGLQKLVCDVPTLAPISAHIRSIDHAPTEPQWNALVEKVLTGIDNDDFKKVVLARRSKVHLDSMLSAAQLLKASYLNNHHSFHFLLSLDSKHSFMGSTPERLYSRVGHELHTEALAGTIGRGGNATKDMELANWLSQDTKNLNENQYVVDDIIDRLTPHSEVVEVEQEPRLVRLRKVQHLKRNIYAELKAGINGVQLLSALQPTAAVAGLPRKESMQFILDNEPFARGWYAGSMGYISHERAEFCVAIRSALVLGDQVQLFAGAGIVPGSIAEHEWAELDKKMSTLLSLISDHPPLGVAS

SEQ ID NO: 95140 - protein, 434 aa, Vibrio ruber
  misc_feature (1)..(434): tr|A0A1R4LRR4|A0A1R4LRR4_9VIBR Isochorismate synthase M enF OS=Vibrio ruber DSM 16370 OX=1123498 GN=menF PE=3 S V=1
MSYFYQAVNQLIHQIHQADPQVSRCRQALDFPPHFSLPDWLAVQTLFPKFYWQDREDREEVVALGACMTFSDPAPAYQAISASQRIWGGRSFDGGTAKNPYCKEAFFFLPQIELIREGDAWFLCANLTARDETIQALQQLQSDIPVLPPIETEVLCVDHAPSRAQWCQLVEQALSAMTQQQFDKVVLARQSTFELTQSIQAAQLLKESRRCNDQSFHFLLAIDQRHSFVGSTPERLYQRHGEALVTEALAGTIGRSEDARQDQALSDWLIHDEKNMTENQYVVDDIVERLTPLARSVEVGAETQLVKLRRVQHLKRHITAELNPTINGVQLLGALQPTAAVAGLPRQAAKTFIERYEPFPRGWYAGSIGYISHQRAEFCVAIRSALVMDKQVKLFAGAGIVSGSVAEHEWLELNRKMSTLLSLITEISPEEVVS

SEQ ID NO: 95141 - protein, 438 aa, Vibrio rumoiensis
  misc_feature (1)..(438): tr|A0A1E5E3P3|A0A1E5E3P3_9VIBR Isochorismate synthase M enF OS=Vibrio rumoiensis 1S-45 OX=1188252 GN=menF PE=3 SV=1
MSELNQVIESLIEKIIDGQVSSENRVSEPVNLPADFNATDWLQEQTLYPRFYWQSRDEREEVVALDQIHDFTDPIAAYAILGEQQRVWGGKSFDSEHANNHHQSSYFFLPKIELMRQDDQWTLNANLSSDFQSIIVALKNLKADYQLSAPLLPQASSVHYSPQFDEWKSILDKALSAIEDNQFEKVVLARETMVELKQPIYASQLLKASREKNRNSFHFLISLAPNDSFLGSTPERLYCRNGDMLETEALAGTTGRSDDLAEDKQLADWLLNDDKNLRENQIVVNDIIERLAPYAETIDVQPEAQLIQLRRVQHLKRHIHGNLSLGVKGVQLLTALQPTAAMAGLPREPSLNFIRINEPFTRGWYSGSVGYFSHNHAEFCVAIRSAVMSGNTVKLYAGAGIVLGSEAEYEWQELNRKTATLLNLISDYPIENDRCEDA

SEQ ID NO: 95142 - protein, 437 aa, Vibrio sagamiensis; identical to SEQ ID NO: 95071
  misc_feature (1)..(437): tr|A0A511QBZ2|A0A511QBZ2_9VIBR Isochorismate synthase M enF OS=Vibrio sagamiensis NBRC 104589 OX=1219064 GN=men F PE=3 SV=1

SEQ ID NO: 95143 - protein, 435 aa, Vibrio scophthalmi
  misc_feature (1)..(435): tr|F9RPM2|F9RPM2_9VIBR Isochorismate synthase MenF OS=V ibrio scophthalmi LMG 19158 OX=870967 GN=menF PE=3 SV=1
MSYFQQAITELIERVKDATDEVTRLVQVLPTKPDFAFIDWLQAQPIFPKFYWQSRDTREEVVALGQLSTFNDPAPAYAFLKGEQRIWGGRSFDGQSAKNPRCPASFFFLPKVELCRQDQQWVIAANISGCKQQTIESLLQLRTVIPKLLPVSAHIQHIEHTPTQPQWESLVEKVLTGIADNQFKKVVLARETTLELDSAICAAQLLKASAEHNQHSFHFMLAQNERHSFIGSTPERLYSRQGKDLYTEALAGTIGRGNNASQDMELANWLTQDSKNLNENQYVVDDIIDRLKPYSDLVEVESEARLVRLRKVQHLKRSIHAHLNQGVNGVQLLSALQPTAAVAGLPRKESMDFIQQHEPFARSWYAGSMGFISQQRAEFCVAIRSAQIVDEVIQLYAGAGIVPGSIAEHEWQELDKKMSTLLSLISDHPPLGVAS

SEQ ID NO: 95144 - protein, 459 aa, Vibrio shilonii
  misc_feature (1)..(459): tr|A6D8E6|A6D8E6_9VIBR Isochorismate synthase MenF OS=V ibrio shilonii AK1 OX=391591 GN=menF PE=3 SV=1
MIYVVGINRVSRVYKIKSYSFEVDLSHLTKAITQLVEKLERAPQGTKRLEQELQGSPKTHGIDWLDAQPHYPKFYWQSRDTREEVVALGQLHTFSEAAPAYTILSENQRVWGGRSFDGHSDKNRRCMSAFFFLPQVELIRFDEGWRLAVNIGMSKEVSIRALKQLVADAKELAPLASDIVSLRHTPEKAQWCDLVDDVLAGIQQDKFKKVVLARKTCVDLKHSISPAQLLKASYAQNHHSFHFLMALSPGHAFVGSTPERLYRRVGQELETEALAGTIGRGGNAAQDMELANWLTQDDKNINENQYVVDDILQSLSPHSDQVHLESELRLVRLRKVQHLKRNILAHLHKGINGVQLLQALQPTAAVAGLPRAEAMQYIQQNEPFARGWYAGSVGYLSHEKAEFCVAIRSALLVKDELQLFAGAGIVPGSIAEHEWQELDKKMSTLLSLISDQPSLGVAS

SEQ ID NO: 95145 - protein, 435 aa, Vibrio sinaloensis
  misc_feature (1)..(435): tr|A0A0A5JHA1|A0A0A5JHA1_9VIBR Isochorismate synthase M enF OS=Vibrio sinaloensis OX=379097 GN=menF PE=3 SV=1
MSYFHQAVTELIERVKDAKDGVTRLVQVLEEKPDFAFIDWLEAQPLFPKFYWQSRDTREEVVALGQLHTFVEPAPAYAILADDQRIWGGRSFDGQTDKNRRCMSSFFFLPQIELIRFDETWSLAANLSADKHRTLASLYKLQHEVTPLLPVSAHIEHIQHTPEKAEWSQLVEKVLTGIENNDFKKVVLARKTAVTLSAPLCASQFLKSSYLHNHHSFHFMLSLDRKHSFIGSTPERLYLRQGQELYTEALAGTIGRGFNASQDMELANWLANDSKNLNENQYVVDDIIERLSPHSERVEVEQEARLVRLRKVQHLKRSIHAHLHKGVNGVQLLSALQPTAAVAGLPRKESMAFIRENEPFARGWYAGSMGFISHQRAEFCVAIRSALVLNDQVQLFAGAGIVPGSVAEYEWQELDKKMSTLLSLISDNPPLGVAS

SEQ ID NO: 95146 - protein, 394 aa, Vibrio sp.
  misc_feature (1)..(394): tr|A0A3N9TCC4|A0A3N9TCC4_9VIBR Isochorismate synthase O S=Vibrio sp. LJC006 OX=2487322 GN=EES38_19280 PE=4 SV=1
MKREVIGYIQLSNVVLNQKLESAPFFFSSPSATMLGAGIEDEFTGVIPFSQLAEKATSMLQKAKKNEQDNPILFGIVPFSEENPSRFLIPNQLYVSSSTRAEQKVDSSTSAPGKLVSSPTGERYKQGVLDAIGLFSSTELSKVVLSRAIEVGTDEDIDQLRLLKNMLAINSTGYTFAASLENGNKMMGASPELLVARKGSNVISNPLAGSLPSSDDVAVNSVRSEQLLNSGKDLYEHGFVVEEVERVLNKYCHSLYTPMVPSVIKTKTMLHLSTVLEGQMNNPEISVLQLASELHPTPAVCGYPRQTAYKAIRDIEKYDRGYFTGMVGWCDSRGNGEWVVTIRCAEVQKRSMKVFAGAGIVSQSQPQSELDETGAKMSTILSAAGIELNDILVA

SEQ ID NO: 95147 - protein, 435 aa, Vibrio spartinae
  misc_feature (1)..(435): tr|A0A1N6M6S5|A0A1N6M6S5_9VIBR Isochorismate synthase M enF OS=Vibrio spartinae OX=1918945 GN=menF PE=3 SV=1
MSYFYQAVNQLIHQIHQASPQVSRCRQELDFPPHFTLPDWLAAQTLFPQFYWQDRDCQEEVVALGACVTFADPAPAYHVITDSQRIWGGRSFDGGTTKNPHCKEAFFFLPQIELIREGHAWFLCANLTQARDTTIEALRQLQHEIPTLPPMATEVLSVDHAPQRPQWCQLVEQALSAMMQQQFDKVVLARQSTFQLTQSIQAAQLLKESRRHNDQSFHFLLAIDPRHSFVGSTPERLYQRHGEALFTEALAGTIGRSDDLQQDQALSDWLLHDDKNMTENQYVVDDIVDRLAPLARSVEVGAETALVKLRRVQHLKRHIAAVLKPTINGVQLLGALQPTAAVAGLPRQAAKTFIERYEPFPRGWYAGSIGYISHQRAEFCVAIRSALVMDKQVKLFAGAGIVSGSVAEHEWLELDRKMSTLLSLITEISPEEVVS

SEQ ID NO: 95148 - protein, 435 aa, Vibrio splendidus
  misc_feature (1)..(435): tr|A3UT93|A3UT93_VIBS1 Isochorismate synthase MenF OS=V ibrio splendidus (strain 12B01) OX=314291 GN=menF PE=3 SV=1
MSHFQQTISALIERVQNAQASEVRCVEVLTQKPSFAFIEWLHAQPLFPKFYWQSRDTREEVVALGQLHTFSDPAPAYAILGEDQRIWGGRSFDGHTAKNRRCMESFFFLPQVELIRFDDTWSLAVNLSPDRVASINALNKLSVEAAILAPLSAHIEQINHVPEREQWGNLVDKVLQGISDEEYKKVVLARKTTLQLDAPICAAQLLKASYLQNHHSFHFMLVLDSKHSFIGSTPERLYSRYGTELDTEALAGTIGRGENATEDMELANWLSQDSKNLNENQYVVDDIIERLTPHSQTVHVEKDTRLVRLRKVQHLKRNIHAQLNNGVNGVQLLAALQPTAAVAGLPRKEAMDFILEHEPFARGWYAGSVGYISHQRAEFCVAIRSALVVNDQVQLFAGAGIVPGSVAEHEWQELNKKMSTLLSLISDHPPLGVAS

SEQ ID NO: 95149 - protein, 434 aa, Vibrio superstes
  misc_feature (1)..(434): tr|A0A511QT76|A0A511QT76_9VIBR Isochorismate synthase M enF OS=Vibrio superstes NBRC 103154 OX=1219062 GN=menF PE=3 SV=1
MSHLANAIKQLAQQVESAPRDVCRVEVAIEKLCADSVLPWMGNQSLFPKFYWQSRDTTEEVVALGQARTFNEINPAYSVLNQDQRIWGGYAFPYKENKGRCLSSFFFLPHIELVRRKQDWFLAANLMEDRDAVRRAVYRLNGDTMSLSEHMPAVSDVLHTPNKELWNDNVELALETIHNSDLKKVVLARQTTIKLDSALQGIELLALSRKQNRHSFHFLFQLEEGHSFIGSTPERLYSRRGQLIETEALAGTIGRHSNPAQDLQLANWLINDKKNLQENQYVVDDIVESLAPFCSNIEVEGEARLVRLRRVQHLKRHIQAELTKHADRGRLLQALQPTAAVAGLPRRLALEFIERHEPFSRAWYSGSVGYISEQSAEFCVAIRSALVQEDNLHLFAGAGIVPGSQAEHEWQELDKKMSTLLSLITEQSVLEQAS

SEQ ID NO: 95150 - protein, 403 aa, Vibrio tapetis
  misc_feature (1)..(403): tr|A0A2N8ZM58|A0A2N8ZM58_9VIBR Vibriobactin-specific is ochorismate synthase OS=Vibrio tapetis subsp. tapetis O X=1671868 GN=vibC PE=4 SV=1
MFRDSVGNKLLLTKLFDDDLDGALFFFSSPTVTMLTEGVAAELTETLKFSELDDQINNLFLKVKSDDNDNPIAVGVIPFSEGNPVHFIVPKRIVTTSPIRPNSIEESECLGVCRPSTVWSNPTAQVYMKSVLEAESCCGNCDSSLDKVVLSRTVEVDTETEIDRISLLKRLLKQNPGGYTFSTKLGSGGEDSYLMGSSPELLVSRKGQYVCSNPLAGSRRRSTDEEINLQNSESMIDSEKDLHEHAVVVDAVERALQPWCSNLYVPLIPSVMATKSMLHLSTKIEGTILDVSTSALKLASHLHPTPAVCGYPTDNAHQFINNTEPFDRGYFTGLVGWVDSRGNGEWVVVIRCAQVEKKRLKVYAGAGIVSGSEPLSELNETGNKMRTVLNALGIDLKEEMETT

SEQ ID NO: 95151 - protein, 440 aa, Vibrio tasmaniensis
  misc_feature (1)..(440): tr|B7VHY8|B7VHY8_VIBTL Isochorismate synthase MenF OS=V ibrio tasmaniensis (strain LGP32) OX=575788 GN=menF PE= 3 SV=1
MNEVDLSHFQQTISALIERVQNAQASEVRCVEVLTQKPSFAFIEWLHAQPLFPKFYWQSRDTREEVVALGQIHTFSDPAPAYAILGEDQRIWGGRSFDGHTAKNRRCMESFFFLPQVELLRFDKTWSLAVNLSPDRVASINALNKLSVEAAILAPLSAHIEQINHVPEREQWGNLVDKVLKGISDEEYKKVVLARKTTLQLDAPICAAQLLKASYLQNHHSFHFMLVLDSKHSFIGSTPERLYSRYGTELDTEALAGTIGRGENATEDMELANWLSQDSKNLNENQYVVDDIIERLTPHSQTVHVEKEARLVRLRKVQHLKRNIHAQLNNGVNGVQLLAALQPTAAVAGLPRKEAMDFILEHEPFARGWYAGSVGYISHQRAEFCVAIRSALIVNDQVQLFAGAGIVPGSVAEHEWQELNKKMSTLLSLISDHPSLGVAS

SEQ ID NO: 95152 - protein, 462 aa, Vibrio thalassae
  misc_feature (1)..(462): tr|A0A240EH23|A0A240EH23_9VIBR Isochorismate synthase M enF OS=Vibrio thalassae OX=1243014 GN=menF PE=3 SV=1
MCFLIYVVGINRVSRVYKIKSYSFEVDLSHLTKAITQLVEKLERAPQGTKRLEQELLGPPNTHCIDWLDTQPHYPKFYWQSRDTREEVVALGQLHTFSEPAPAYTILSDNQRVWGGRSFDGHSEKNRRCMSAFFFLPQVELIRFDDGWRLAVNIGMSKEVSIRALKQLVADAKELAPLASDIVSLSHTPEKARWCELVEDVLKGIEQDKFKKVVLARKTCVDLKHSISPAQLLKASYIQNHHSFHFLMALSPEHAFVGSTPERLYRRVGLELETEALAGTIGRGGNAAQDMELANWLTQDHKNINENQYVVDDILHSLSPHSEQVHLETELRLVRLRKVQHLKRNILAHLHQGINGVQLLQALQPTAAVAGLPRAEAMQYIQDNEPFARGWYAGSVGYLSHEKAEFCVAIRSALLVKDELQLFAGAGIVPGSIADDEWQELDKKMSTLLSLISDQPSLGVAS

SEQ ID NO: 95153 - protein, 440 aa, Vibrio toranzoniae
  misc_feature (1)..(440): tr|A0A120DGI9|A0A120DGI9_9VIBR Isochorismate synthase M enF OS=Vibrio toranzoniae OX=1194427 GN=menF PE=3 SV=1
MDEVDLSHFQQTLSALIERVHNAQASEVRCVEVLTQKPSFAFIEWLHAQPLFPKFYWQSRDTREEVVALGQLHTFSDPAPAYAILGEDQRIWGGRSFDGHTAKNRRCMESFFFLPQVELIRFDNTWSLAVNLSPDRVASINALNKLSVEAAILAPLSAHIEQITHVPEKELWGSLVNKVLQGISDEEYKKVVLARKTTLQLDAPICAAQLLKASYQQNHHSFHFMLVLDSKHSFIGSTPERLYSRHGTELDTEALAGTIGRGENATEDMELANWLSQDSKNLNENQYVVDDIIERLTPHSQMVHVEKDARLVRLRKVQHLKRNIHAQLNAGINGVQLLAALQPTAAVAGLPRKEAMDFILEHEPFARGWYAGSVGYISHQRAEFCVAIRSALVVNDQVQLFAGAGIVPGSVAEHEWQELNKKMSTLLSLISDHPPLGVAS

SEQ ID NO: 95154 - protein, 435 aa, Vibrio tubiashii
  misc_feature (1)..(435): tr|A0A0A5I849|A0A0A5I849_9VIBR Isochorismate synthase M enF OS=Vibrio tubiashii OX=29498 GN=menF PE=3 SV=1
MSYFHQAVTELIERVKDAEDGVNRLVQVLAEKPDFAFIDWLEAQPLFPKFYWQSRDTREEVVALGQLHTFVEPAPAYAILAEDQRIWGGRSFDGQTSKNRRCMSSFFFLPQIELIRFDDKWSIAVNLNAEKHRTLASLYKLQLEVTPLPSVSSHIETVQHTPEKEQWTHLVEKVLTGIKNEQFKKVVLARKTEVSLDSPLCASQLLKASYQQNHHSFHFLLALDSKHCFLGSTPERLYARQGQELYTEALAGTIGRGTNASQDMELANWLSNDTKNLNENQYVVDDIIDRLSPHSQHVEVEQEVRLVRLRKVQHLKRSIHAQLHKGVNGVQLLSALQPTAAVAGLPREESMTFIQQHESFARGWYAGSMGFISQQRAEFCVAIRSALVLNDKVQLFAGAGIVPGSVAEHEWQELDKKMSTLLSLFSDNPPLGVAS

SEQ ID NO: 95155 - protein, 373 aa, Vibrio variabilis
  misc_feature (1)..(373): tr|A0A090TDG4|A0A090TDG4_9VIBR Menaquinone-specific iso chorismate synthase OS=Vibrio variabilis OX=990271 GN=J CM19239_970 PE=4 SV=1
MSQLTTAIAQLISKLEKAPHGCKRIEQEIQGHPKFHCIDWLEAQPHFPKFYWQSRDTREEVVALGQLHTFSEASPAYAILADNQRVWGGRSFDGHTDKNRRCMSAFFFLPQVELIRFDTSWRIAVNISMSVDKAIGSLKQLMADVTELPPLASSIVGMTHTPNEQQWHDLVDDVLTGIEEDKFKKVVLARKTTIDVKDPISPAQLLKASYRENHHSFHFLMALSKELAFVGSTPERLYRRVGQQLETEALAGTIGRGDNAAQDMELANWLTQDLKNINENQYVVEDILQSLAPHSSEVHLEKELRLVRLRKVQHLKRNIVAQLSKGINAVQLLQALQPTAAVAGLPRSEALAYIQDNEPLLVVGMRVPSLFKP

SEQ ID NO: 95156 - protein, 393 aa, Vibrio vulnificus
  misc_feature (1)..(393): tr|A0A3Q0KZ21|A0A3Q0KZ21_VIBVU Isochorismate synthase O S=Vibrio vulnificus (strain CMCP6) OX=216895 GN=VV2_083 5 PE=4 SV=1
MKREVIGYTKMANELLDNELSSSPFFFASPNNTMMGIGVQEERLQTLPFSELADVANNMLKNAKTSESDNPVLFGVVPFNQENMTRFVIPKTLYISSSTRASHTSASSAPQARLISSPSGHHYKQGVHDLLGMFANQELSKVVLSRAIEVATETDIQQQALLRNLLSINAKGYTFAAQIGDNQKLMGASPELLVAKKGSHLISNPLAGSRPRSESEQQNQASIQSLLNTGKDLHEHGLVVEEVERVMSKYCCNLYTPMVPSVIETQTMLHLSTQLEGQVLDPAINVLQVAAELHPTPAVCGYPREKAYEAIKRLEQFDRGYFTGMVGWCDSRGNGEWVVTIRCAEVQPRRMKVFAGAGIVNESQPQSELDETGAKMNTILKAAGIQLNEMLTA

SEQ ID NO: 95157 - protein, 435 aa, Vibrio xiamenensis
  misc_feature (1)..(435): tr|A0A1G7Y4M3|A0A1G7Y4M3_9VIBR Isochorismate synthase M enF OS=Vibrio xiamenensis OX=861298 GN=menF PE=3 SV=1
MPYFHQAVSALIQRIERASAGANRLIQNIEQAPDFSFIDWLEAQPIFPKFYWQSRDGRETVVALGQLYTFTDPLPAYAILAEGQRVWGGRSFDGQTDKNRRCMASFFFLPQIELICQDDEYSLAVNLTSDINRTLASLKKLQHQVAPQPALQHQVKHMSHTPEREQWGKLVDKVLAGIEQQAFKKVVLARRTTVELDAPLSAAGLLKASIAKNRDSFHFLLALDQTHCFMGSTPERLYQRQGAELYTEALAGTSGRGETAEQDQALANWLSHDDKNLNENQYVVDDIVERLTPHSLDVDVEAKPQLVRLRKVQHLKRRIHATLKPGINGVQLLSALQPTAAVAGLPRDASMAFIRENEPFARGWYAGSMGYISHREAQLCVAIRSALVVEQSLHLFAGAGIVPGSIAEHEWQELDRKMSTLLSLINQYSPLGVAS

SEQ ID NO: 95158 - protein, 440 aa, Vibrionales bacterium
  misc_feature (1)..(440): tr|A0A366XR42|A0A366XR42_9GAMM Isochorismate synthase M enF OS=Vibrionales bacterium C3R12 OX=2267228 GN=menF P E=3 SV=1
MYEVDLSHFYQAIQTLVERVKSSTPKEVRLVERLDEKPPFVFIDWLEAQPIFPKFYWQSRDTREEVVALGKVHTFSDPAPAYTILGEGQRIWGGRSFDGHTEKNRRCMESFFFLPQIELIRYDDQWSIAVNLPSEKQTLINALNKIVCDVPSLLPLSAQIEHTEHTPSKAIWADLVERVLSGIAADDFKKVVLARKTVLKLDAPICSAQLLKASYEQNHHSFHFMMSLDSKHSFMGSTPERLYSRFGQELHTEALAGTIGRGKNATQDMELANWLSQDAKNLNENQYVVDDIVERLTQHSETVNVQQEARLVRLRKVQHLKRSIHAQLKPNTNGVQLLGALQPTAAVAGLPRAEAMQFIQENEPFARGWYAGSVGYISHQKAEFCVAIRSALIVDNQVQLFAGAGIVPGSNAEHEWQELNKKMATLLSLISDNPPLGVAS

SEQ ID NO: 95159 - protein, 463 aa, Virgibacillus chiguensis
  misc_feature (1)..(463): tr|A0A1M5VSQ9|A0A1M5VSQ9_9BACI Isochorismate synthase M enF OS=Virgibacillus chiguensis OX=411959 GN=menF PE=3 SV=1
MIEVQGQQVEELLREAINQMGLKQSAQLVSITKRVEAQDPVLFFASAAKLNKERCFWMSTKDAFSVVGVGNVFEINANEDRFQYIEETWKKLIDDVWVYNPFKAPGTGLVTLGGLDFDPKKPRTDLWNDFPRLQFKIPEYILTKNNSDFYLTINIKVCKDDHPIQLLKAIETVETKLFQTAKEQLDLPKIIHKKMIAPEQWKNTVQRAKQEIQQKQMDKIVLAREMRLTFSKQVDVSQVLSDLIDKQSNSYIFAFEQSDSCFVGATPERLVRVENKKLLSTCLAGTAPRGATEEEDQRIAAMLFQDPKNREEHDFVVQMIKQGINKYCTDVQIPDTPVVYPLKNLQHLYTPVTGVLKDGYTIFNVIKELHPTPALGGVPRDLSMTFIRNNEQLDRGWYGAPVGWLDSNNYGEFAVAIRSALIQEDEASLFAGCGIVKDSDPEEEFAETEIKFSPMLTVLGGQP

SEQ ID NO: 95160 - protein, 464 aa, Virgibacillus dokdonensis
  misc_feature (1)..(464): tr|A0A2K9J4E4|A0A2K9J4E4_9BACI Isochorismate synthase M enF OS=Virgibacillus dokdonensis OX=302167 GN=pchA PE=3 SV=1
MIEVQGQQVEELLREAINQMGLKQRTQLVSITKRVEAQDPVLFFASAAKLNKERCFWMSTKDAFSIVGVGNVFEINANEDRFQYIEETWKKLLDDVWVYNPFKAPGTGLVTLGGLDFDPKKPRTDLWNDFPRLQFKIPEYILTKNNSDFYLTINIKVCKDDHPIQLLKAIEAVETKLFQTVKEQLDLPKIIHKKVIAPEQWKKTVQRAKQEIQQKQMDKIVLAREMRLTFSKQVDISQMLSDLIDKQSNSYIFAFEQSDKSCFVGATPERLVRIEKKELLSTCLAGTAPRGATVEEDQRIAATLFHDPKNREEHDFVVQMIKQGINKYCTDVQIPDIPVVYPLKNLQHLYTPVTGILKDGYTIFNVIKELHPTPALGGVPRDLSMTFIRNNERLDRGWYGAPVGWLDSNEYGEFAVAIRSALIQDDEASLFAGCGIVKDSDPEEEFAETEIKFSPMLTVLGGQA

SEQ ID NO: 95161 - protein, 461 aa, Virgibacillus halodenitrificans
  misc_feature (1)..(461): tr|A0A1J0H330|A0A1J0H330_VIRHA Isochorismate synthase M enF OS=Virgibacillus halodenitrificans OX=1482 GN=menF PE=3 SV=1
MIEILEEQLEKIIDEAIPNINSADDTQLISITKPVKNINPLHFFHAASSTGKDRVFWSSTQEDFFIAGIGNTAQLRVEGLPSQEVEKKWRAILDKAIIYNDNKVPGAGIVALGGISFDPKKERTPLWENFNDSEFTVPEFLLTQNNGANYYTVNILVRKGDIAEQVANEIRGMEEILFSDTTLPSTDVAILNRYEVAPEKWKESVELATREIDKGKASKIVLAREIRLKLNKSVNIASVLEKLLHTQPNSYIFAFEKGKDCFVGATPERLVRLDKRKLLSTCLAGTAPRGKNKEEDREISKSLLHDEKNRQEHEFVVQMIKQAISHYCKDINIPEKPVIYPLKNLQHLYTPVTATLLGDYSIFDIIEQLHPTPALGGTPREESLAFIRENELLDRGWYGAPVGWLDSNGSGEFAVAIRSGLIQDDEASLFAGCGVVKNSDPEKEYEETNIKFLPMLSVLGG

SEQ ID NO: 95162 - protein, 463 aa, Virgibacillus indicus
  misc_feature (1)..(463): tr|A0A265N972|A0A265N972_9BACI Isochorismate synthase M enF OS=Virgibacillus indicus OX=2024554 GN=menF PE=3 SV =1
MIEIKEDQLEHILDRAIQSISSDDVLQLVSITKSINKTDPLTFFDGVKTLKKDRIFWTSTTDEFCLAGVGSAYEISADEARFEITEDRWNSLLDEAIIYNPYQVPGTGVVALGGMAFDPKKKQTALWKKFKPSQFTIPEYMLTKNENSYYFTVNIVVKKDDHPVQLAKGIMEAEAVIFSNQTSASGNAAISKKKEIKPEQWKETVRQATEEIREKQTEKIVLAREMRLKFNKHAEIGQIIKNLMDTQSNSYVFAFEKGEDCFVGATPERLVKLENEHLLSTCLAGTAPRGATPAEDKKISNDLLHDDKNRQEHDFVVEMIKQSIKKYCTDINIPEEPVIYPLKNLQHLYTPVTAILKNSYSIFDIIKQLHPTPALGGTPKKEAMEFIREHELLDRGWYGAPVGWLDSNKNGEFAVAIRSGLIQGNEASLFAGCGVVKNSNPEAEYEETNIKFLPMLSVLGGQA

SEQ ID NO: 95163 - protein, 464 aa, Virgibacillus massiliensis
  misc_feature (1)..(464): tr|A0A024Q9R3|A0A024Q9R3_9BACI Isochorismate synthase M enF OS=Virgibacillus massiliensis OX=1462526 GN=entC PE =3 SV=1
MIEVQEQQVEDILQDAIQRITTSGKDFQLVSITKKIQTTNPVHFFEAALRLNKERVFWTSAKESFTMTGVGNAFEMDANENRFSFIESAWEQLRGQAVIYNPYEVPGTGLVSLGGMDFDPEKKRTELWGDFPSIYFTVPEYLLTKFENECYLTVNIKITKEDHVIQLSNQIRNDERILLSLKELEKQPLEIVQQHDIAPDQWKQIVQKATEEISHDQVDKVVLAREVRLKLNRDVNRAAVIEKLIATQSNSYVFAFEQKNSCFIGASPERLVKIKNKELLSTCLAGTAPRGKTNEQDKKIANALMQDMKNRQEHDFVVQMIKQGVAKYCEQVYVPEVPIIYPLKNLQHLYTPVTGVLKQGHSIFDIVSQLHPTPALGGLPRTASMLFIRENELLDRGWYGAPVGWFDYNENGEFAVAIRSGLIQKDEASLFAGCGVVKDSQPEEEFEETRIKFAPMLSVLGGES

SEQ ID NO: 95164 - protein, 461 aa, Virgibacillus necropolis
  misc_feature (1)..(461): tr|A0A221MBB9|A0A221MBB9_9BACI Isochorismate synthase M enF OS=Virgibacillus necropolis OX=163877 GN=menF PE=3 SV=1
MIETKEKLIESILNKGIQKTTRTNHIQLVSITKKIDAIDPLHFFEAAKQLKEDRTFWSSTAEDFFMIGVGTSYKIEATDNRFGETDEQWRRVKQQAIVYDPYQQPGTGLVAMGGMAFDPGKDRTELWENFSDSEFTIPSYMLTKHGNNHYFTTNVHVSKNDQVEDLANTIDENFTTLLKQSVTMPVNTVIIDKNEIEPEKWKQTVDDATDKIKTSNVEKIVLSREVRVKLNQKAEIATVLHDLLATQTNSYVFAFEHGEDCFVGATPERLIRIENEHLLSTCLAGTAPRGKTVEEDNALANQLFNDKKNRSEHDFVVKMIRKSISPYCTTIEVPNEPTIYPLKNLQHLFTPVTAKVKPDVSLFDIIKQLHPTPALGGVPRQESLQFIREYELMDRGWYGAPIGWVDHNNNGEFAVAIRSGLIQGDAASLFAGCGVVKDSDPEAEYEETNIKFLPMLTVLGG

SEQ ID NO: 95165 - protein, 463 aa, Virgibacillus pantothenticus
  misc_feature (1)..(463): tr|A0A0L0QUD6|A0A0L0QUD6_VIRPA Isochorismate synthase M enF OS=Virgibacillus pantothenticus OX=1473 GN=menF PE= 3 SV=1
MIGVQDQQVEELLRDAIHQMPLTKEAQLVSITKQVEPKDPVLFFAAAARLNKERCFWTSTKDSFSIVGVGNIFEISANQDRFQYTETTWKKLLGDVRIYNPFQAPGTGLVSLGGLDFDPQKPRTELWADFPRVKFTVPEYMLTKNMDDVYFTINLKIRRDDHPIQLMKAIEAAERILFQASKEQHGTPRLVNSKVIAPEQWKQTVQKAKQEIQQKQMDKIVLARELRLQFNKQVNISHILGDLIKKQSNSYVFAFEQNNSCFVGATPERLVKVDKQELLSTCLAGTAPRGKTEVEDQQIADNLLHDQKNREEHDFVVQMIKQGLNKYCTDVHIPDTPVVYPLKNLQHLYTPVTGRLKDGYTIFNVVKELHPTPALGGVPRDLSMTFIRDYERLDRGWYGAPVGWLDSNDHGEFAVAIRSALIQEDEASLFAGCGIVKDSNPEEEFEETRIKFSPMLTVLGGQA

SEQ ID NO: 95166 - protein, 461 aa, Virgibacillus phasianinus
  misc_feature (1)..(461): tr|A0A220U465|A0A220U465_9BACI Isochorismate synthase M enF OS=Virgibacillus phasianinus OX=2017483 GN=menF PE= 3 SV=1
MIETKEEIIESTLNHAKNKTLSTNHIQLVSITEKIDTVNPLHFFEAAKQLQVNRTFWCSTAEDFLMVGVGNTYEIEATDNRFQETDEQWNRIKQEAIIHDPFQQPGTGLVVMGGMSFDPKKERTSLWENFSESAFIVPAYTLTKYKETYYFTINVQISSHDQVSMLAKEINESRHVLLKQSEKMPIKTKIADKYEIAPEKWKETVVEATNQIKTSNLEKIVLSREVQIKLNKKAEITAVLDDLLATQTNSFVFAFEHGEDCFVGATPERLIKIQNEKLLSTCLAGTAPRGQTPEEDEAFANQLYNDEKNRSEHDFVVKMIKQAIRPYSANIEVPNEPIIYPLKNLQHLYTPVTATVRQDVSIFDIIGKLHPTPALGGVPRQASLQFIREHELLDRGWYGAPVGWIDHNNNSEFAVAIRSGLIKGDTASLFAGCGVVKDSDPEAEYEETNIKLVPMLSVLGG

SEQ ID NO: 95167 - protein, 461 aa, Virgibacillus profundi
  misc_feature (1)..(461): tr|A0A2A2I9J7|A0A2A2I9J7_9BACI Isochorismate synthase M enF OS=Virgibacillus profundi OX=2024555 GN=menF PE=3 S V=1
MIEIKEKQLEHLLDSAIKEIQYHDELQLVSITKEISYANPFHFFDKAKAIGKDRTFWTSTGDQFYLVGAGNAYEIIAEDSRFEGTEEGWNNLINEAIIHNKYKYPGTGIVALGGMSFDPRKAPSDLWNKFKPSQFTIPEYMLTIRKNNFYFTANVFVKKDDHSVQLANDIKRHENELISQMETSLTAINIKDKKEIEPDKWKETVRYATEEISDHKAEKIVLAREIRLKFDKQADIGTILNKLIDTQSNSYIFAFEKGEDCFVGATPERLVRVENKRLLSTCLAGTAPRGKTKEEDERISHDLLNDEKNRQEHDFVVKMINHSIKNHCTNIKIPDEPVIYPLKNLQHLYTPVTAKLKDRYSIFDIIKQLHPTPALGGTPRTESLAFIREHELLDRGWYGAPVGWLDSNQNGEFAVAIRSGLIQGDEASLFAGCGVVKDSDPEAEYEETNIKFLPMLSVLGG

SEQ ID NO: 95168 - protein, 461 aa, Virgibacillus salinus
  misc_feature (1)..(461): tr|A0A1H0ZPW5|A0A1H0ZPW5_9BACI Isochorismate synthase M enF OS=Virgibacillus salinus OX=553311 GN=menF PE=3 SV= 1
MIEIKEELIESLLEKAIDQAKSNNKTQMISMTKEINETDPLRFFESAKKLGMDRTFWTSTSEQFFIVGVGSAFQIDANEYRFQNTEKQWKKLLRDAIIHNPYKVPGTGMVTLGGMSFDPSIRKSDLWRKFGHSSFTIPKFILTVNEGKYYVTTNVQVNQGDHSRQLANGIKHAEETLMSYSTTLPDQTRIHSKDEIAPQQWMDTVERATEKINQDEAEKIVLAREVRIKLTGDASITAVLDKFISSQTNSFIFAFERDGDCFVGASPERLVKLQNQQLLSTCLAGTAPRGKTKEEDRKISYKLLHDEKNRSEHDFVVNMIKNAMELYCTSIQIPKEPVIYPLKNLQHLYTPVTATLKKGYSIFDIIQQLHPTPALGGVPREESLKFIREQEQLDRGWYGAPIGWLDSNQNGEFAVAIRSGLIQGDEASLFAGCGVVKDSDPQAEYEETNIKFLPMLSVLGG

SEQ ID NO: 95169 - protein, 461 aa, Virgibacillus sp.
  misc_feature (1)..(461): tr|A0A075JQW4|A0A075JQW4_9BACI Isochorismate synthase M enF OS=Virgibacillus sp. SK37 OX=403957 GN=menF PE=3 SV =1
MIEIMEEQLEKIIDEAIPNINTADDYQLISITKQVNKINPLHFFHAASYTKRDRVFWSSTQDNFFIVGVGNAAQLRVEGLSSRNVEKKWRELLNKAIIYNDSKVDGAGIVALGGMSFDPKKERTPLWKNFSDSQFTVPEFLLTQNNGASYYTINILVRKGDHAEEVANEIRSMEEILFSKTALPVTDVTIMNRYEVAPEKWKEAVELATREIGKGSASKIVLAREIRLKLNKSVNIASVLEKLLHTQPNSYIFAFEKGEDCFVGATPERLVKLNKRELLSTCLAGTAPRGKNKKEDKEISENLLHDEKNRQEHEFVVQMIKQAISHYCKDINIPEKPVIYPLKNLQHLYTPVTATLMGHHSIFDIIEQLHPTPALGGTPREESLAFIRENELLDRGWYGAPVGWLDSNGSGEFAVAIRSGLIQDDEASLFAGCGVVKNSDPEKEYEETNIKFLPMLSVLGG

SEQ ID NO: 95170 - protein, 404 aa, Viridibacillus arvi
  misc_feature (1)..(404): tr|A0A0M0LNG0|A0A0M0LNG0_9BACL Isochorismate synthase O S=Viridibacillus arvi OX=263475 GN=AMD00_00350 PE=4 SV= 1
MRENSTVLKKELLDDYKEGDFFLATPSQTLLGKGSFLTVPSDKENRNQMKSLAERVAAVLKTAKEQGHANPMVTGAVPFDYRKDAQLIVPANIWSSVPMQDKCTDQPTKTKKPIYEIKSVPEPSQYMAGVERGLTHIKSGHLDKIVLSRSLHLTSSETVNINRLLQNLACHNKNGYTFAVDLPQSESKIVDSLISKTLIGASPELLVSRTGLEVVANPLAGSRPRSDDPIEDKRRASELLSSTKDLHEHAVVVHAVAEALRPFFKKIDVPERPIVIHTETMWHLSTEVTGELEDPATSSLELAIALHPTPAVCGSPSDLARVAIQEIEPFDRGFFTGMVGWCNAEGDGEWIVTIRCAEVEKQTLRLFAGAGVVAESKPEEELAETSAKFQTMLRAMGIDAKSLN

SEQ ID NO: 95171 - protein, 424 aa, Volucribacter psittacicida
  misc_feature (1)..(424): tr|A0A4R1FXB0|A0A4R1FXB0_9PAST Isochorismate synthase M enF OS=Volucribacter psittacicida OX=203482 GN=menF PE= 3 SV=1
MDSLQQLKSKIADILAQYQPNPTPRIRAFKAQITSSIPLLSWLKAQAIYPQFYFKQRDQEVTFAAIGKVRSFSDKFLAQAFMDQYGFPLVGGIQFEGNTFFFLPQLLLQQQQDKLDCWLFIDEQIPLAQQFEPLMATIAHCQPLQRIEHIKMIDQYCQASFNQWQSWIKQGLQGFKQGELSKVVLANQYHLTADRSINGKDMLWQSEQVNPHCYHFLLAENEDCTFLGSSPERLYRREQQQLNTEALAGTAFMDKDQAKNQQQAHWLLQDPKNQYENQLVVDGICQHLSPYAQHIEVKPTALVRLRNVQHLCRKIQVVLKPDCYDVHCLQAIHPTPAVAGLPQQQARDFIKNCENFHRTWYAGCLGVMQPQQAEFCVTIRSAFVEHNKIRVFAGAGIVEGSDPLLEWQEIERKAKGLISLFNQT

SEQ ID NO: 95172 - protein, 337 aa, Waddlia chondrophila
  misc_feature (1)..(337): tr|D6YW64|D6YW64_WADCW Putative menaquinone-specific is ochorismate synthase OS=Waddlia chondrophila (strain AT CC VR-1470 / WSU 86-1044) OX=716544 GN=menF PE=4 SV=1
MIKSGAVISIRHDQVVIGSGRKEMVSTPKENEKPAFYFPDFFLEDPKPWYQYEESEQLTTEQLATRLPASGSSNGRSWSIQGDEIYSNTFSRLQISFQKGELKKAVPYLFYTSDQPFKVQQSLLSLLNYSSQHPTFLYGFWEDEKGILGGSPELLFHIASDGILTTAAIAGTVESAYEDRLLSDPKLKIEHDLVIEGICASLAPFGKAEVGKTEILRLSHLSHAKTPISVQLERIDCIDALTRALHPTPALGAFPKAGGLNWLANYAKLLPRGRYGAPVGVKIGNHFSCYVAIRNIQWEQGCIRLGVGGGVVRASNEKDERDELALKFEATRSMLNI

SEQ ID NO: 95173 - protein, 385 aa, Weissella cibaria
  misc_feature (1)..(385): tr|A0A0D1KKL9|A0A0D1KKL9_9LACT EntC protein OS=Weissell a cibaria OX=137591 GN=entC PE=4 SV=1
MSFPTEKQLCDRFDRSEHAVYFATADKRTRYYGFGVREEKFGADFQDVAAWAREQRYPVFGGFSFDEQSVTDSALMNGYFVLPEVLYDITDQHLWGRETDPFGAPTPIAGPAITSQTDEYDWPDRVQTAVDDMQQNPNHQKVVLGRQRQVRLTGKLNLATLLADLATQQPNSYHFVLKRGDEVFVSATPERLAKVNRGQFETAGVAGTIRRGTDEAEDARLATELLQDPKNLQEHAYVVETIVSRLQDVATLTLPDGPQIMKNPQVQHLYTPIVGQLNGDNTVLALAERLHPTPALGGKPVDWAMATIQTIEQHPRGLFAGPIGVVKPDGDGEMIVGIRSMWLKQWTATLFAGAGILADSDVQAEFEETGLKMTPMMNLLKEQDK

SEQ ID NO: 95174 - protein, 385 aa, Weissella confusa
  misc_feature (1)..(385): tr|A0A1T4J4V3|A0A1T4J4V3_WEICO Menaquinone-specific iso chorismate synthase OS=Weissella confusa OX=1583 GN=FM1 31_01770 PE=4 SV=1
MSFPSDKQLRDRFAQAENAVYFATADKRSRYYGFGIAEELIGASFEEVADWAKQQRYPVFGGFAFDDQTVPDSQLMNGYFVLPAVLYDITDQYLWGRETNPFGAPYRQETVAIVATTDETDWPERVNNAIQDMTENDTHQKVVLGRQRQVTLSGQLNLAKLLADLADQQPNSYHMVIKRGDEVFISATPERLAKVNRGQFETAGVAGTIRRGETETEDGQLADELLHDAKNLQEHAYVVETIVDRLGDVADLTLPDGPQIMKNPQVQHLYTPIAGKLRGENTVLALAERLHPTPALGGKPVDWAMATIAQIERQPRGLFAGPIGVVKPDGDGEMIVGIRSMWATGTQANLFAGAGILADSNADSEYAETGLKMQPMMNLLEGQAK

SEQ ID NO: 95175 - protein, 393 aa, Weissella hellenica
  misc_feature (1)..(393): tr|A0A5B8TL56|A0A5B8TL56_WEIHE Isochorismate synthase O S=Weissella hellenica OX=46256 GN=FGL75_01165 PE=4 SV=1
MMTFVTEEALQWSFELANDAVYFASPDGQTKYYGFGKQAELIGGSFEQAQIWLAKVQKNQLQPVFGGFAFDEQQINDSRLMNGYFFQPAVVYDVVKQQVMGQKIDLVRQTQSSGTDFATIKDETDWHTRIQVAIDDMQQNMVHEKVVLGRQREIQLTAALNERQIIKSLQKTQPTSYHFVLKHGGELFVSATPERLVKVANGQLATAAVAGTIKRGENESADEALANELWHDQKNRREHQTVVATIKSNLEAANITQLKMPETPQILKNPQVQHLYTPITGTLSADNSLLAIIKQLHPTPALGGKPSTWALETIAAIEKYPRGLFSGPIGVIMPDGDGEFIVGIRSMWYRNKLVNLFAGAGILADSDAAMEYQETDLKLLPMMNVLKEQTLHD

SEQ ID NO: 95176 - protein, 393 aa, Weissella paramesenteroides
  misc_feature (1)..(393): tr|C5R8H2|C5R8H2_WEIPA Isochorismate synthase OS=Weisse lla paramesenteroides ATCC 33313 OX=585506 GN=HMPREF087 7_0267 PE=4 SV=1
MVKFLTEEELQKTFALANDAVYFATPDGQTKYYGFGKQAELIGASFAQVKTWLATLKNDENKPVFGGFAFDKQQIADSKLMNGYFIQPAVVYDVINHEMLGLPIDLVRQTTTFDTNVMQITDETDWPSRIQTAIDDMKQNKQHEKVVLGRQRQVTLSDPLDEQRLLSKLQNSQSTSYHFVLKHCGELFVSATPERLVKVTGGQLSTAAVAGTIKRGADSVSDQALADELWHDSKNRVEHETVVAEIKERLQAANVKSLQVPTEPQILKTPQVQHLYTPITGQLASDSSLLEIAAELHPTPALGGKPRDWALAEIAQIEKMPRGLFSGPIGMMTMDGDGEFIVGIRSMWYRKNLATLFAGAGILAASDAQMEYQETGLKLLPMMNLLKEQINND

SEQ ID NO: 95177 - protein, 384 aa, Weissella soli
  misc_feature (1)..(384): tr|A0A5B8SJX4|A0A5B8SJX4_9LACT Isochorismate synthase O S=Weissella soli OX=155866 GN=FGL88_07710 PE=4 SV=1
MSFPSEKELWQRFELAEVAVYFATADKKSRYYGFGVADEIFSRDIHEIATWAAGKNYLVFGGVPFDDQLHMATMMNGYFLQPEVLYDIAEQHLWGYETNVVTNRSKRRRPEIERVVDETNWVQRVQHAIDAMQSDGTKQKVVLGRQRQVTLSEPLDMAKLIADLQMTQPHNYHFVLKRGNDIFISATPERLVKINDGHLATAGVAGTARRSQDETEDLQLAATLLNDPKNLQEHAIVVNRIVERLAGMAALTVPKGPTIMKNPQVQHLYTPITGQVNDGVTTLSIVDRLHPTPALGGQPEEWALTQIAQLEQNPRGLFAAPVGVLRPSGDGEMVVGIRSMFAHAGKVDLFAGAGILADSDATQEYEETALKMQPMMKLLEKQHD

SEQ ID NO: 95178 - protein, 385 aa, Weissella sp.
  misc_feature (1)..(385): tr|A0A139R4V2|A0A139R4V2_9LACT Isochorismate synthase / Menaquinone-specific isochorismate synthase OS=Weissel la sp. DD23 OX=1777865 GN=WEIDD23_00640 PE=4 SV=1
MSFPTEKQLRDRFDRSEHAVYFATADKRTRYYGFGVREEKFGADFQDVAAWAREQRYPVFGGFSFDEQSVTDSALMNGYFVLPEVLYDITDQHLWGRETDPFGAPTPIAGPAIISQTDERDWPDRVQTAVDDMQQNPNHQKVVLGRQRQVRLTGELNLATLLADLATQQPNSYHFVLKRGDEVFVSATPERLAKVNRGQFETAGVAGTIRRGADEAEDARLATELLQDPKNLQEHAYVVETIVSRLQDVATLTLPDGPQIMKNPQVQHLYTPIAGQLNGDNTVLSLAERLHPTPALGGKPVDWAMATIRTIEQHPRGLFAGPIGVVKPDGDGEMIVGIRSMWLKQQTATLFAGAGILADSDVQAEFEETGLKMTPMMNLLKEQDK

SEQ ID NO: 95179 - protein, 378 aa, Weissella viridescens
  misc_feature (1)..(378): tr|A0A3P2RDI2|A0A3P2RDI2_WEIVI Isochorismate synthase O S=Weissella viridescens OX=1629 GN=D3P96_02205 PE=4 SV= 1
MQKWMTEFSQNENAVYFATADKTTQLVGLGISDEISGWTDETILNQWVQHQNSAVFGGFNFDADQALTGLMGGYFFAPEQLIDLNANSEWTASVPQVTHSSLHLVDEMDETDWTTRMQPVLTQMQIDPTKQKVVLGMQATLTFDGPIQVANLLESLVAQQPESYHFVLKRGTDVFVSATPERIVKLSGNQFETAAVAGSIRRGEDTETDTALADALWHDQKNREEHQIVVDMLVNQLADVSTLTYASTPQMLQTPQIQHLYTPIQGQLNSETALLALVERLHPTPALGGWPRDWAKSIIEDYELAPRGLFAAPLGYYLPNGTGEFIVGIRSMLVQADQARLFAGAGILAESDLAQEAQEIQLKMTPMRQLLEDQTDAK

SEQ ID NO: 95180 - protein, 372 aa, Winogradskyella psychrotolerans
  misc_feature (1)..(372): tr|S7VMW2|S7VMW2_9FLAO Isochorismate synthase OS=Winogr adskyella psychrotolerans RS-3 OX=641526 GN=ADIWIN_3369 PE=4 SV=1
MDAISFFDALEQQYKNNLPFVVYSRPINSIIKCWLQEDDSVYKSETFTESGFLFAPFDIKQNSILLPKEHCLYSEITTSNLEVEDFEPTEILQSETEKIQHIDLVSKGIESIKNQDLQKVVLSRCETKSLQDTNPLTIFKRLFNTYTNAMVYCWYHPIVGLWIGATPELLLKVEGKRLTTISLAGTQPYQRESEPTWTNKEFEEQKIVTDYITEQLKPYTSNINVSEVDTVRAGNLLHLKTRIISVLKDGADLKSIIEALHPTPAVCGFSKAKAKDFILNNENYNREYYTGFLGELNLKQSRTRNTNRRNVENNAYAVVKTQSNFYVNLRCMQLKDAKANIYVGGGITKDSNPDNEWEETVNKTGTINTVLN

SEQ ID NO: 95181 - protein, 483 aa, Xenococcus sp.
  misc_feature (1)..(483): tr|L8M8A4|L8M8A4_9CYAN Isochorismate synthase family pr otein OS=Xenococcus sp. PCC 7305 OX=102125 GN=Xen7305DR AFT_00034190 PE=4 SV=1
MTQSKITIPVISQEESNLVLDNGDFDDFWNNSKLQFTVTKYTKILSYAQKIPLVDPLAFLQKFSSKNAVHFYWENPNKKESIVACGITKESLIRSGNRFEITQKFVDDCFNQILPQGEVALSRTAPRIFCSFSFFSDASVSDQDFPSATVFLPRLQLVKKNKQCFLIVNYPLKNPQDKSEILNKINYKVATIDWQNQENLVTDGQIKSNWEKQNIFSTEHSQYFRNVVGSALESIAMNEFSKIVIAQATDITSKIPFKVIQSLHNLRERHPDCYIFSIANGQGKNFIGASPERLVSIQNRQLVTDALAGSAPRGKTNAEDVHWSNLLLRSRKEQREHQAVSDFLIARLRQMGLKPYQLPLQLLRLSNIQHLWTPIYAHLPEYIGPLEIVAQLHPTPAVAGVETEIACEKIRHYERFDRSLYAAPLGWIDNQGNSEFIVGIRSALIEGKHARLYAGAGIVSGSNPDKEFIEIQLKLQSLLKALV

SEQ ID NO: 95182 - protein, 389 aa, Xenorhabdus bovienii
  misc_feature (1)..(389): tr|A0A077NYI4|A0A077NYI4_XENBV Isochorismate synthase 1 OS=Xenorhabdus bovienii str. oregonense OX=1398202 GN= entC PE=4 SV=1
MSGIVNDLLPLTLQEDDFIFLSPHKSLLARGCLATLTHPASSGHHVEGEFQQRVQQLLRQTQQSGVENPIIVGAIPFDKRQPCSLFIPQTYHWFDRHAFNLSDSPVQVEGQAHYIPDHDAFCAMVESALSPLRIGELDKVVLSRLLQIESIPPLSALNLWLQLNRQNPESYNFHLPLADGTLIGASPELLLRKEGNVLRSCPLAGSVRRGDNTASDRNAKEKLLASGKDRHEHRVVTEAIRRQLTDLCQSLTIPEPSLLSTPTLWHLATEIQGILADDRDSALSLACLLHPTPALCGAPYTSSRNLIGALEPFDRGWFGGIVGWCDARGNGEWVVAIRCGKVRPHQIELFAGAGIVPDSVPENEWMETHTKFNTMLNALGFAMQQEQTL

SEQ ID NO: 95183 - protein, 461 aa, Xenorhabdus budapestensis
  misc_feature (1)..(461): tr|A0A2D0J184|A0A2D0J184_XENBU Isochorismate synthase M enF OS=Xenorhabdus budapestensis OX=290110 GN=menF PE=3 SV=1
MLLVGMFVDKIANIIADVCEILNTENVSEVGIQSFCFSLPATSETDWLEWLAAQPHYPQFYWQHRDGHEEVAACGQIRLFSNAIKAETFLHQHIQFPQMRIWGLNAWEKTDVCHIRNNQNKEQLQENEKNTGDEESYLFLPRMEIRRCHGATRLYLNINGQADIDNIHLFLRQIVPHQPFQTSYAAVLNATHMPESEQWNILLKQALNAITQKKMEKVVMARKTELTLNMPLQAAQFMASSRGVNHRCYHFMLAFNDNQAFLASTPERLYYRYQLQVFTEALAGTTENSEDDQKAKELGQWLLEDKKNQHENLIVVNDICQRLQGGVESIDVAPPDVIRLRKVQHLRRHIHGVLNQVCDSDCLHRLQPTAAVAGLPREAARQFLAENEPFHRGWYAGSAGYLCLEQSEFAVSLRCAYINGDLLSLYAGAGIVSGSDPEQEWIEIENKAAGLRSLLGSLANE

SEQ ID NO: 95184 - protein, 454 aa, Xenorhabdus cabanillasii
  misc_feature (1)..(454): tr|A0A3D9UE42|A0A3D9UE42_9GAMM Isochorismate synthase M enF OS=Xenorhabdus cabanillasii OX=351673 GN=menF PE=3 SV=1
MDQIANIIADICEILNTKNISEVGIQSFSFSLPATSDTDWLEWLAVQPHYPQFYWQHRDGHEEVAACGQIRLFSNAIKAEKFLHQHAQFPQMRIWGLNAWEKTDVCHIRNNQNKEQLQESKKSTGNEESYLFLPRMEIRRYHGATHLYLNIDGQADIDNIHLFLRQIVPRQPFQTSYAAVLNATHTPENEQWNILLKQALNAITQKKMEKVVMARKTELTLNMPLQAAQFMASSRGVNHRCYHFMLAFNDNRAFLASTPERLYYRYQLQIFTEALAGTTVNSEDAQKAKELGQWLLADKKNQHENLIVVDDICQRLQGGVESIDVAPPDVIRLRKVQHLRRHIHGVLNQVCDSDCLHRLQPTAAVAGLPREAARQFLAENEPFHRGWYAGSAGYLCLEQSEFAVSLRCAYINGDLLSLYAGAGIVSGSDPEQEWMEIENKAAGLRSLLGNLANE

SEQ ID NO: 95185 - protein, 447 aa, Xenorhabdus doucetiae
  misc_feature (1)..(447): tr|A0A068QWS1|A0A068QWS1_9GAMM Isochorismate synthase M enF OS=Xenorhabdus doucetiae OX=351671 GN=menF PE=3 SV= 1
MGRDVNQITNIIADICELLNTENVSETGIQSFSFVLPVDSGAHWLEWLSAQSHYPQFYWQHRDGDEEVVACGQIRLFSKVTDAEAFLRQPHQFAQMRLWGLNAWDKVNFTPSQHENIIGGESYLFLPRLELRRHRGENRLYIHVDGQADLENARQFLKQLLPGQPLLPLQTAILKAKHTPESAQWHRLLEHALNAISQNKIEKVVIARKTELTLNSPLHTAQLMAASRSVNHGCYHFMLAFSAEHAFLASTPERLYYRNQLQFYTEALAGTVANAEDDQQAAELGQWLLEDEKNQHENLIVVDDICQRLRGGVVSVDVAPPDVIRLRKVQHLRRPIRGVLNHVCDSDCLRRLQPTAAVAGLPREAARQFLANHEPFKRDWYAGSAGYLGLEQSEFAVSLRCACIHDKVLALYAGAGIVAGSDPAQEWLEIENKAAGLRTLLTSMIDE

SEQ ID NO: 95186 - protein, 440 aa, Xenorhabdus innexi
  misc_feature (1)..(440): tr|A0A1N6MVY0|A0A1N6MVY0_9GAMM Isochorismate synthase M enF OS=Xenorhabdus innexi OX=290109 GN=menF PE=3 SV=1
MGKIVDQIAGIIADVCETLSAKNVSEAGIQMFCFPLPVNDNTDWLEWLAAQPHYPQFYWQHRDGHEEVAACGQIRLFNNAAQAEMFLNQYAQFPQMRIWGLNGWDKEENTDNEESYLFLPRIEIRRCHEATYLYLNIDGQSDLDNIHQFLRLISPHQPFQPSCTAVLNTKHMPECEQWNILLEQALDAITRKRMEKVVMARKTELMLDMPLQAAQFMAASREVNHHCYHFMLAFSHTQAFLASTPERLYYRHQRQLFTEALAGTTINADDDQKAKELGQWLLQDKKNQHENLLVVDDICQRLQGGVTAIDVAPPDVIRLRKVQHLRRHINGFLNQISDSDCLRRLQPTAAVAGLPREAARQFLAENEPFHRGWYAGSAGYLGFEQSEFAVSLRCAYIDGALLSLYAGAGIVSGSDPEQEWREIENKAAGLRSLLGNLAVE

SEQ ID NO: 95187 - protein, 462 aa, Xenorhabdus khoisanae
  misc_feature (1)..(462): tr|A0A0J5FUB2|A0A0J5FUB2_9GAMM Isochorismate synthase M enF OS=Xenorhabdus khoisanae OX=880157 GN=menF PE=3 SV= 1
MGKDVNQTADVIAGICEYLNAGNVSEIGIQSFSFTLPAGSSVHWLAWLSAQPHYPQFYWQHREGHEEVVACGQIRLFSNIAGAEKFLQQYQQVKQMRLWGLNAWDKVDSEHCHHSYFYHDNVWQDKHENQDKHENITGRESYLFLPRLELRRHRSENRLYINVDGRADIENACQFLRQLLPHQPFLPLQTTILEAKHVPESEQWNILLEQALEAITKSKMEKVVIARKTELTLNSPLQAAQFMAASRGVNHRCYHFMLAFSANHAFLASTPERLYYRNQLQFCTEALAGTVANSEDDQEAAKLAQWLLEDKKNQHENLIVVDDICQRLQGGVASVDVTPPDVIRLRKVQHLRRHIRGVLSHVCDSDCLRRLQPTAAVAGLPREAARQFLSDNEPFNRGWYAGSAGYLCLEQSEFAVSLRCAHIYDNLLSLYAGAGIVAGSDPEQEWIEIENKAAGLRTLLVN

SEQ ID NO: 95188 - protein, 458 aa, Xenorhabdus mauleonii
  misc_feature (1)..(458): tr|A0A1I3IZ96|A0A1I3IZ96_9GAMM Isochorismate synthase M enF OS=Xenorhabdus mauleonii OX=351675 GN=menF PE=3 SV= 1
MLLTGKAVNQIANIIANVCESLNAENVSEIGIQSFSFALPAGKSDQWLAWLAAQPHYPQFYWQHREGHEEVIACGKIRLFSNIREAEEFLQRHHQFSQMRLWGLNAWNKVNFYHPYDENAGQGKLEDAMCGESFLFLPRFELRRYHDENRLYINIDGKTDIENACQFLSQFLPHETLYPLQTAILQARHTPEHGRWNILLGQALDAITQNKMEKVVMARKTELILNSSLPPAQFMAASRQVNHHCYHFMLAFDAERAFMASTPERLYYRNQLQLYTEALAGTVANAEDAQEAAELAQWLLGDKKNQHENLIVVDDICQRLQGGVTSIDVGLPDVIRLRKVQHLRRHIRGVLKQVSDSDCLRRLQPTAAVAGLPREAARQFLTENEPFNREWYAGSAGYLCLEQSEFAVSLRCAQIHDNKLSLYAGAGIVADSDPEQEWIEIENKAAGLRTLLINLIDE

SEQ ID NO: 95189 - protein, 458 aa, Xenorhabdus miraniensis
  misc_feature (1)..(458): tr|A0A2D0JUE1|A0A2D0JUE1_9GAMM Isochorismate synthase M enF OS=Xenorhabdus miraniensis OX=351674 GN=menF PE=3 S V=1
MNQTADVIAGVCEYLNAGNVSETGIQSFSFTLPAGSSVHWLAWLSVQPHYPQFYWQHRDGHEEVVACGKIRSFSNIAGAEKFLQQYHPVSQMRLWGLNAWDKMDSEHCHHSYFCHDNVWQGKCENQDHHENIAGGESYLFLPRLELRRHRGENRLYINVDGRADIKNACRFLRQLLPHQPFLPLQTTILKAKHVPESEQWNILLKQALEAITKSKMEKVVIARKTELTLNSPLQAAQFMAASRGVNHRCYHFMLAFSANHAFLASTPERLYYRNQLQFCTEALAGTVANSEDDQEAAKLAQWLLEDKKNQHENLIVVDDICQRLQGGVALVDVTPPDVIRLRKVQHLRRHIRGVLSHVCDSDCLRRLQPTAAVAGLPREAARQFLSDNEPFNRGWYAGSAGYLCLEQSEFAVSLRCAHIYDNLLSLYAGAGIVAGSDPEQEWIEIENKAAGLRTLLVN

SEQ ID NO: 95190 - protein, 447 aa, Xenorhabdus nematophila
  misc_feature (1)..(447): tr|A0A0A8NXW0|A0A0A8NXW0_XENNE Isochorismate synthase M enF OS=Xenorhabdus nematophila str. Websteri OX=1437826 GN=menF PE=3 SV=1
MSQIANIIADVCEFLSTEEVSEIGIQSFSFVLPANNGIHWLEWLSVQPHYPQFYWQHRDDHEEVVACGLIRQFNHIVEAEIFLQQHSQFPQMRLWGLNAWDKVNFYHFHHENSATDKHKNITSKDSYLFLPRLELRRHRGENRLYINIDGKADIENACRFLRQLLPHQSLLPLQTAILDTRHMPEYEQWNILLGQALDAITQRKLEKVVIARKTELTLNSPLQAAQFMAASSRVNHRCYHFMLAFSANHAFLASTPERLYYRNQLQFYTEALAGTVANSEDAYKATELAQWLLEDKKNQHENLIVVDDICQRLQGGVTLVDVALPDVIRLRKVQHLRRHIRGILNKVCDSDCLRRLQPTAAVAGLPREAARQFLADNEPFDRGWYAGSAGYLCLEQSEFAVSLRCAHIHDNLLSLYAGAGIVAGSDPEQEWIEIENKAAGLRTLLVS

SEQ ID NO: 95191 - protein, 389 aa, Xenorhabdus poinarii
  misc_feature (1)..(389): tr|A0A068R0G6|A0A068R0G6_9GAMM Isochorismate synthase e ntC OS=Xenorhabdus poinarii G6 OX=1354304 GN=entC PE=4 SV=1
MSGIVNDLLPLTLQEDDFIFLSPHKSLLARGCLATLTHPASSGHHVESEFQQSVQQLLRQTQQAGVENPIIVGAIPFDKRQPCSLFIPQTCYWFDRHAFNLSDSPVQVEGQAHFIPDHDAFCAMVESALNPLRIGELDKVVLSRLLQIESIPPLSALNLWLQLSRQNPESYNFHLPLADGTLIGASPELLLRKEGNVLRSCPLAGSVRRGDNTASDRNAKEKLLASGKDRHEHRVVTEVIRRQLTDLCRSLTIPEPSLLSTPALWHLATEIQGILADDRNSALSLACLLHPTPALCGAPYTSSRNLIGALEPFDRGWFGGIVGWCDARGDGEWVVAIRCGKVRPHQIELFAGAGIVPDSVPENEWMETHTKFNTMLSALGFAMQQEQTL

SEQ ID NO: 95192 - protein, 436 aa, Xenorhabdus sp.
  misc_feature (1)..(436): tr|A0A2D0LA91|A0A2D0LA91_9GAMM Isochorismate synthase M enF OS=Xenorhabdus sp. KJ12.1 OX=1851571 GN=menF PE=3 S V=1
MDQIASIIANVCETLRTKNVSEVGIQSFSFPLSVTDDTDWLEWLAAQPHYPQFYWQHRDGHEEVVACGQIRLFRDATQAENFLNQHAQFPQMRIWGLNAWEREENTDNEESYLFLPRIEIRRCHKATYLYLNIDGQADIDNIYVFLRKIAPHQPFQSSRVTILNTTHRPESEQWNTLLEQALDAITRKKMEKVVMARKTELMLDMPLQAGQFMAASREVNHHCYHFMLAFSDTQAFLASTPERLYYRHQLQLFTEALAGTTINSDDDQKAKELGQWLLKDKKNQHENLIVVDDICQRLQGGVTAIDVAPPDVIRLRKVQHLRRHINGFLNQVSDSDCLSRLQPTAAVAGLPREAARQFLAENEPFRRGWYAGSAGYLGLEQSEFAVSLRCAYIDGALLSLYAGAGIVSGSDPEQEWIEIENKAAGLRSLLSNLSME

SEQ ID NO: 95193 - protein, 436 aa, Xenorhabdus stockiae
  misc_feature (1)..(436): tr|A0A2D0KWD3|A0A2D0KWD3_9GAMM Isochorismate synthase M enF OS=Xenorhabdus stockiae OX=351614 GN=menF PE=3 SV=1
MDQIASIIANVCETLRTKNVSEVGIQSFSFPLSVTDDTDWLEWLAAQPHYPQFYWQHRDGHEEVVACGQIRLFRDATQAENFLNQHAQFPQMRIWGLNAWEKEENTDNEESYLFLPRIEIRRCHKATYLYLNIDGQADIDNIYAFLRKIAPHQPFQSSRVTILNTTHRPESEQWNTLMEQALDAITRKKMEKVVMARKTELMLDMPLQAGQFMAASREVNHHCYHFMLAFSDTQAFLASTPERLYYRHQLQLFTEALAGTTINSDDDQKAKELGQWLLKDKKNQHENLIVVDDICQRLQGGVTAIDVAPPDVIRLRKVQHLRRHINGFLNQVSDSDCLSRLQPTAAVAGLPREAARQFLAENEPFRRGWYAGSAGYLGLEQSEFAVSLRCAYIDGALLSLYAGAGIVSGSDPEQEWIEIENKAAGLRSLLSNLSME

SEQ ID NO: 95194 - protein, 441 aa, Xenorhabdus szentirmaii
  misc_feature (1)..(441): tr|W1ITG5|W1ITG5_9GAMM Isochorismate synthase MenF OS=X enorhabdus szentirmaii DSM 16338 OX=1427518 GN=menF PE= 3 SV=1
MNHIAGIIANVCEYLNRENISEVGIQSFSFALPAGNNAHWLEWLATQQHYPQFYWQHRDGHEEVVACGKIRLFSNVTDAEQFLRQHGQFPQMRMWGLNAWDKVVMAQHGDVIGGESYLFLPRLEMRRHQGENRLYINIDGKADIENACQFLNQLLPPDSFLPLQTAILKATHIPESAQWNILLKTALDAIEQNKMEKVVMARKSELRLNSPLQAAQFMATSRQVNHRCYHFMLAFGPYHAFVASTPERLYHRKKLQFYTEALAGTVVNSEDDHQAEALAKWLLEDKKNQHENLIVVDDICQRLQGGVSRVDVSPPDVIRLRKVQHLRRPIHGVLTQACDSDCLRRLQPTAAVAGLPRDAARQFLAEHEPFNREWYAGSAGYLCLEESEFAVSLRCAHINNDLLSLYAGAGIVSGSDPEQEWIEIENKAAGLRTLLTNRIDE

SEQ ID NO: 95195 - protein, 380 aa, Xinfangfangia sp.
  misc_feature (1)..(380): tr|A0A3P5XST0|A0A3P5XST0_9RHOB Isochorismate synthase D hbC OS=Xinfangfangia sp. CIP 111625 OX=2483812 GN=dhbC PE=4 SV=1
MTLLSAQSLAARLPDFLIAGPGHALAWEGVRRRLAAGPLASLAARAADFFAAGHDGPQRLVGAVPFDPQAADALFQPAREGTVPAGAPGARGPALLPVQVRHEPPAAAFRAAVARATERIGAGEFDKIVLSRSLHLAASGDEEAGNLLARLRADTLATVFSVPLPGGRHLIGATPELLLERRGAQVFSHPLAGSARRSADPRADRAAAAALLGSDKDRREHGMAAEMVLDTLAPFCRRIAAEETRPVPTARMWHLGTRIAGELRDPDTPCAALLAALHPTPAVCGLPRAPALAALPGLEGYDRGFYAGAVGWLEASGDGCWYLALRCAELSATGARLYAGAGVVAGSDPAAEEAETSAKFLAMLAAFGIDESGNPMSPEE

SEQ ID NO: 95196 - protein, 472 aa, Xylanibacterium sp.
  misc_feature (1)..(472): tr|A0A4P6ENQ2|A0A4P6ENQ2_9MICO Isochorismate synthase O S=Xylanibacterium sp. 2JSPR-7 OX=2509459 GN=ET495_15270 PE=4 SV=1
MSASTFPHPAGRPGRRSGSTSPLPEAQPLVVRTAALDLPDDGLTTLVDLLPASGLPLRAAAGADRAGGAPLAWVRRGDGIVGWGEALRVDTRGAERFAAAEAAWQAVLDRAVVRDDVRLPGTGPVAFGSFAFDAESAEGGVLVVPRVVVGRRGGQAWITTISATLDAAPTAALLDPARREPVASPGTVTESDGAVDATGWPGIVADAVARIQAGRLEKVVLARDVVATAEHPLDPRWMLRRLARAYEATWAFSVAGMVGATPELLVRSEKGLVASRVLAGTIRREPGMTDDDALLRAAHLARSSKDLEEHEHAVVSVARALEPFCTSMNVPEQPFVLHLPNVMHLASDVTGVLDRAAGTSGGTPGGPPSSLTLAAALHPSAAVCGTPTAPARELIRELEGMDRGRYAGPVGWMGGDGDGEWGIALRSARLDDADPHRVRLFAGCGVVAASDPAAELAESEAKLVPMRWALGS

SEQ ID NO: 95197 - protein, 451 aa, Xylanimicrobium sp.
  misc_feature (1)..(451): tr|A0A4P6F2Y2|A0A4P6F2Y2_9MICO Isochorismate synthase O S=Xylanimicrobium sp. FW10M-9 OX=2509457 GN=ET471_07725 PE=4 SV=1
MSATAVPPPAGRPAGRRDDVAPGSQTRPLVVRTAAIDLPDGGLTTLVDLLPDAKPLAWVRRGDGIVGWGEALRVTTGGETRFADADAAWQAVLERAVVRDDVRLPGTGPVAFGSFAFDATSADGGVLVVPRVVVGRRGDRAWITTISSGLGAAPTTALLDPAHRTPVTGPGAVTEADGAVAAADWPAIVADAVARIQAGRLEKVVLARDVVATTGRALDPRWLLGRLAAAYETTWTFSVGGMVGATPELLVRSEKGLVASRVLAGTIRREPGMTDDDALLRAAHLARSSKDLEEHEHAVVSVARALEPFCTSMNVPEQPFVLHLPNVMHLASDVTGVLDRPADRPGPSSLALAAALHPSAAVCGTPTAPARELIRQIEGMDRGRYAGPVGWTGSDGDGEWGIALRSARLDDTDPRRVRLFAGCGVVAASDPAAELAESEAKLVPMRWALRG

SEQ ID NO: 95198 - protein, 451 aa, Yersinia aldovae
  misc_feature (1)..(451): tr|A0A0T9U8Y8|A0A0T9U8Y8_YERAL Isochorismate synthase M enF OS=Yersinia aldovae OX=29483 GN=menF PE=3 SV=1
MKQLSGLLGELRQKLRAGFPDQAGIRQIIVPAPGRIGSQLLEWLAAQCHFPQFYWRHREGHEEAAVCGQTQIFNDMQSADDFIQQNQDAGGLRIWGLNAFEPVIVHGHNDAEQPVQPSFLFLPRIEILRRGEQTYLTLNLTSDFSLHQDALRAMTFIDQLVAAKPLAAFDVQVRHASHMPEYPQWSRLIQHALDDIEQQKMEKVVLARTTQLTLDKPLSCGAFMAASRRVNHHCFHFMLRFDAQRAFLGSSPERLYLRQQLHLETEALAGTVSNAPSHQQAAELADWLMHDEKNQRENLLVVDDICQRLQGGVAAVDVMPPEIIRLRKVQHLRRCIHAQLNHASDTDCLQRLQPTAAVAGLPRNVARQFITEHEPISRGWYAGSAGYLSLKQTEFSVTLRSAWVEDQKVHLYAGAGIVAGSDAEQEWQEINNKSAGLRTLLGSQQQDSKTP

SEQ ID NO: 95199 - protein, 460 aa, Yersinia bercovieri
  misc_feature (1)..(460): tr|A0A2G4TYF0|A0A2G4TYF0_YERBE Isochorismate synthase M enF OS=Yersinia bercovieri OX=634 GN=menF PE=3 SV=1
MKQLSGLLGELRQKLRAGFPDQAGIRQIILPASGQVGSQLLEWLAAQCHFPQFYWHHREGHEEAAVCGQTRQFNDVQSADAFIQQHELIKQNSDATGLRIWGLNAFEPVSLVLPSAVTEACALQQTQTSFLFLPRIEILRRGNRTHVTLNLVSDCSLQQDALLAIAFIDQLVAAKPLPALDVQVQHASHVPEYPQWRSLIQQALSSIEQQAMEKVVLARATRLTLDKPLSCCAFMAASRQVNHHCFHFMLRFDTQRAFLGSSPERLYLRQKWHLETEALAGTTSNDDDHQQAMALADWLMGDEKNQRENLLVVDDICQRLQGGVVAVDVMPPEIIRLRKVQHLRRRIHAQLNRASDTDCLQRLQPTAAVAGLPRNIARQFIAENEPFSRGWYAGSAGYLSRQQSEFSVTLRSAWLEDQWVNLYAGAGIVAGSDPELEWQEINHKSAGLRTLLDSQQESKT

SEQ ID NO: 95200 - protein, 454 aa, Yersinia enterocolitica
  misc_feature (1)..(454): tr|A0A2R9TE39|A0A2R9TE39_YEREN Isochorismate synthase M enF OS=Yersinia enterocolitica subsp. palearctica YE-P4 OX=1329364 GN=menF PE=3 SV=1
MKQLSGLLGELRQKLRANFPDQAGIRQIILPAPGQVGNQLLEWLSAQYHFPQFYWCHREGHEEAAVCGQTRQFNDVQSADQFIQQHRAVAGLRVWGLNAFEPVSIVEPSPDSSQQTQTSFLFLPRIEILRRGKNTYLTLNLVSDDSLAQDALLAIAFIDQLVAAKPLPAVDVVVEAASHMPEYPQWSRLIEQALGNIEQQKMEKVVLARTTRLMLDKPLLCGAFMAASRQVNHHCFHFMLRFDGLRAFLGSSPERLYLRQFQHLETEALAGTASNDDDTAQAAELADWLMHDEKNQRENLLVVDDICQRLQGGVAAVDVMPPEVIRLRKVQHLRRCIHAQLNHANDADCLHRLQPTAAVAGLPRNVARQFITENEPFSRGWYAGSAGYLSLKQTEFSVTLRSAWVEDKQIHLYAGAGIVAGSDAEQEWQEINNKSAGLRTLLVNIKSDNNHKMQ

SEQ ID NO: 95201 - protein, 441 aa, Yersinia entomophaga
  misc_feature (1)..(441): tr|A0A3S6F465|A0A3S6F465_YERET Isochorismate synthase M enF OS=Yersinia entomophaga OX=935293 GN=menF PE=3 SV=1
MTQLSDLLEELRHLLDADFPDRAGVRQIALPAPAVLGSQLLEWLATQPVFPQFYWRHRDGHEEAAVCGQVRLFRDMSAADEFIRQYKNHAGLRIWGLNAFEPFPAIANETDISSAFFFLPRLQLLRRGGEISLTLNLASETSLQQDVCLALDFIEQLLAPRPIPELTVSVETLVHQPDQKGWCQLLEQALRAIANQQMEKVVLARMTHLTLRETLFSPAFMAASRQVNHQCFHFMLRFDDRRAFLGSSPERLYRRQQSQLETEALAGTVANDKDDAKAACLAHWLAGDDKNQRENLLVVDDICQRLQGGVSAVDVMPAEVIRLRKVQHLRRRIRAQLQPNVTDADCLQRLQPTAAVAGLPREPARLFILDAEPFSRGWYAGSSGYFSLAQSEFAVALRSAQIEGDQVQIYAGAGIVAGSDPLMEWQEIENKSAGLRSLLEK

SEQ ID NO: 95202 - protein, 441 aa, Yersinia frederiksenii
  misc_feature (1)..(441): tr|A0A0B6FNB3|A0A0B6FNB3_YERFR Salicylate synthase OS=Y ersinia frederiksenii Y225 OX=1454377 GN=AW19_780 PE=4 SV=1
MTDTRSELRLNLPAERTLAAIVSLIRQNPTEDYYVYERPPCWYVGLGKRASLTLSSDGSQAITESEEGCRTAPVTSSLAHYARQFRAQHAGAGQRVFGMAGFNYAACIRGIAFPPGEWPLLSLLVPRDELVFDAGEVTILAHSADQCRHLARQLQDISPAPAGGALLADLTAQGKDYQHQVTRALEEIAAGEYTKVIVSRALALAERIDMPATLWRGRMSNTPARSFLLQQGAFAATGFSPEMVVTVEQDIVTSEPLAGTRALSGSAGEDADNRAELQSDSKEIVEHVISVKAAIGELETLCVRDSVAVTDLMSVRERGSVQHLGSQVCGKLASGRDAWDAFDVLFPAITASGIPKLPALAAILRLEAVPRELYSGAILMLEGERSFEAALVLRSAFQDARRSWIQAGAGVIAQSNALRELTETCEKLSSVAPYLVVSQAK

SEQ ID NO: 95203 - protein, 392 aa, Yersinia hibernica
  misc_feature (1)..(392): tr|A0A481QKL2|A0A481QKL2_9GAMM Isochorismate synthase O S=Yersinia hibernica OX=2339259 GN=D5F51_19185 PE=4 SV= 1
MPINSPFSAVPSTFLFTSRHQSIKTQGIFERITQAAQDRAGHDNSLQSALQAALSRARDAGQQQPIIVGAIPFDTRQPSCLFIPESYQVCDRQTLVNAARVKSGRAVTSRAIRSLPDENEFKHIVAEAVAACQRGVIHKVVLSRILEIDTDTPVDSDQVMNQLLIQNHTAHHFRVPLADGGVLLGASPELLVRKHLAGVYTNPLAGSAKRQIDPQHDVDISLALLDSEKDQYEHRLVIDEIRRLLTPYCTHLHIPAQPSLINTAALWHLSSAISGELENPQTRVLELANLLHPTPALCGLPTQKARRLIQQLEPFERGLFSGIVGWCDEQGNGEWAVIIRCATVHPTQVRLFAGAGIVDASQPAAEWAETEAKLGTMLNAIAITPQERCYEY

SEQ ID NO: 95204 - protein, 444 aa, Yersinia intermedia
  misc_feature (1)..(444): tr|A0A208ZIT3|A0A208ZIT3_YERIN Isochorismate synthase M enF OS=Yersinia intermedia OX=631 GN=menF PE=3 SV=1
MKQLSGLLGELRQKLRAGFPDQAGIRQIIVPVSGRIGSQLLEWLAAQCHFPQFYWLHREGHEEAAACGQTRLFNDMQAADHFIQQHRDASGLRIWGLNAFEPVIVNQHADGAPQAQASFLFLPRIEILRRGEQTYLTLNLASDFSLQQDALLAITFIDQLVAAKSLPALDAQVQHAHHMPEYPQWSHLIQHALDEIAQQKMEKVVLARATQLTLDKPLSCAAFMAASRQVNHHCFHFMLRFDARRSFLGSSPERLYLRQQLHLETEALAGTVSSADSPQQAAELADWLMHDEKNQRENLLVVDDICQRLQGGVAAVDVMPPEIIRLRKVQHLRRCIHAQLTRASDTDCLQRLQPTAAVAGLPRNVARQFIARYEPFPRGWYAGSAGYLSAKQTEFSVALRSAWVEDQQVHLYAGAGIVAGSDPEQEWQEINNKSAGLRTLLGSQ

SEQ ID NO: 95205 - protein, 464 aa, Yersinia kristensenii
  misc_feature (1)..(464): tr|A0A0T9N8C4|A0A0T9N8C4_YERKR Isochorismate synthase M enF OS=Yersinia kristensenii OX=28152 GN=menF PE=3 SV=1
MKQLSGLLGELRQKLRAGFPDQAGIRQIILPAPGQVGNQLLEWLAAQGHFPQFYWHHRDGHEEAAVCGQTRQFNDVASADQFIQQHSAVAGLRIWGLNAFEPVTIIVEATNIAETANIATPAAEAPQQTQTSFLFLPRIEILRRGNNTHLTLNLVSDYSLAQDALLAIAFIDQLVIAKPLPALDVVVENASHMPEYPQWSRLIQQALGNIEQQKMEKVVLARATRLRLDKPLSCAAFMAASRQVNHHCFHFMLRFDGSRAFLGSSPERLYLRQLQHLETEALAGTTSNDNDTAQATALADWLMHDEKNQRENLLVVDDICQRLQGGVVAVDVMPPEIIRLRKVQHLRRRIHAQLNRANDADCLYRLQPTAAVAGLPRNVARQFISENEPFSRGWYAGSAGYLSLKQTEFTVTLRSAWLDDSQIHLYAGAGIVAGSDAEQEWQEINNKLAGLHTLLTNENYNPKM

SEQ ID NO: 95206 - protein, 470 aa, Yersinia massiliensis
  misc_feature (1)..(470): tr|A0A0T9PDJ8|A0A0T9PDJ8_9GAMM Isochorismate synthase M enF OS=Yersinia massiliensis OX=419257 GN=menF PE=3 SV= 1
MKQLSGLLGELRQKLRAGFPEQAGIRQIILPASGQVGSQLLEWLAAQCHFPQFYWHHRDGHEEAAVCGQTRQFNDMQSADEFIQQHQLTKLNSETTGLRIWGLNAYEPVSVVDAAADSKTCATHSAQSTCSTQSTQTSFLFLPRIEILRRGNHTHVTLNLVSDFSLQQDALLAIAFIDQLVTAKPLPALDVHVQQASHMPEYPQWRDLIEQALGSIEQQTMEKVVLARATRLMLDKPLSCSAFMAASRQVNHHCFHYMLRFDASKAFLGSSPERLYLRQKWHLETEALAGTASNDDDHQQARVLSDWLMQDEKNQRENLLVVDDICQRLQGGVAAVDVMPPEIIRLRKVQHLRRRIHAKLNRASDTDCLQRLQPTAAVAGLPRNVARQFIAQNEPFSRGWYAGSAGYLSLQQSEFSVTLRSAWVEDQRINLYAGAGIVAGSDPELEWQEINHKSAGLRTLLDSHSQDNKS

SEQ ID NO: 95207 - protein, 461 aa, Yersinia mollaretii
  misc_feature (1)..(461): tr|A0A0U1I9C4|A0A0U1I9C4_YERMO Isochorismate synthase M enF OS=Yersinia mollaretii OX=33060 GN=menF PE=3 SV=1
MKQLSGLLGELRQKLRAGFPDQAGIRQIILPASGQVGSQLLEWLAAQCHFPQFYWHHREGHEEAAVCGQARQFNDVQSADAFIQQHELIKQNSDATGLRIWGLNAFEPVSLVVPSADTAVCAVQQTQTSFLFLPRIEILRRGHQTYVTLNLVSDFSLQQDALLAIAFIDQLVAAKPLPALDVQVQNASHMPDYPQWSRLIQQALGNIEQQTMEKVVLARATRLTLDKPLSCSAFMAASRQVNHHCYHFMLRFDALRAFLGSSPERLYLRQKWHLETEALAGTTSNDDDHQQARVLADWLMQDEKNQRENLLVVDDICQRLQGGVAAVDVMPPEIIRLRKVQHLRRRIHAQLNRANDTECLQRLQPTAAVAGLPRNVARQFIAENEPFPRGWYAGSAGYLSRQQSEFSVTLRSAWVEDHWVNLYAGAGIVAGSDPELEWQEINHKSAGLRTLLEPHPQESNR

SEQ ID NO: 95208 - protein, 441 aa, Yersinia nurmii
  misc_feature (1)..(441): tr|A0A0T9KMJ9|A0A0T9KMJ9_9GAMM Isochorismate synthase M enF OS=Yersinia nurmii OX=685706 GN=menF PE=3 SV=1
MTQLSDLLEELRHLLDADFPDRAGVRQIALAVPAVLGVQLLEWLATQPVFPQFYWRHRDGHEEAAVCGQVRLFRDMSAADEFIRQYKNHTGLRIWGLNAFEPFPAIANETDISSAFLFLPRVQLLRRGGEIILTLNLASETSLRQDVCRALDFIEQLLTPRPIPELAVSVETLVHQPDQNGWYQLLEQALRAIANQQMEKVVLARMTRLTLRETLFSPAFMAASRQVNHQCFHFMLRFDDRRAFLGSSPERLYRRQQSQLETEALAGTVANDKDDAKAARLAHWLADDDKNQRENLLVVDDICQRLQGGVSAVDVMPAEVIRLRKVQHLRRRIRAQLQPNVADADCLQRLQPTAAVAGLPRKPARLFILAEEPFSRGWYAGSAGYFSLAQSEFAVALRSAQIEGNQVQIYAGAGIVAGSDPLMEWQEIENKSAGLRSLLEK

SEQ ID NO: 95209 - protein, 451 aa, Yersinia pekkanenii
  misc_feature (1)..(451): tr|A0A0T9PRW4|A0A0T9PRW4_9GAMM Isochorismate synthase M enF OS=Yersinia pekkanenii OX=1288385 GN=menF PE=3 SV=1
MKQLSGLLGELRQKLRAGFPDQAGIRQIIVPAPGRIGSQLLEWLAAQCHFPQFYWRHREGHEEAAVCGQTWLFTDMQSADHFIQQHRDLSGLRIWGLNAFEPVMVDGYRNAEQPVQASFLFLPRIEILRRGEQTYLTLNLASDLSLHQDALRAIIFIDQLVAARPLPELDVCVQHASHLPEYPQWCHLIQRALDDIGQQKMEKVVLARTTRLTLDKPLSCGAFMAASRQVNHHCFHFMLRFDARRAFLGSSPERLYLRQQLHLETEALAGTVSNAESQQQASELADWLMHDEKNQRENLLVVDDICQRLQGGVAAVDVMPPEIIRLRKVQHLRRCIHAQLSRVSDTDCLQRLQPTAAVAGLPRNVARQFIAEYEPFSRGWYAGSAGYLSAKQTEFSVALRSAWLEEQQIHLYAGAGIVAGSDAEQEWQEINNKAAGLRTLLGSRQQNNKIQ

SEQ ID NO: 95210 - protein, 455 aa, Yersinia pestis
  misc_feature (1)..(455): tr|Q0WDZ8|Q0WDZ8_YERPE Isochorismate synthase MenF OS=Y ersinia pestis OX=632 GN=menF PE=3 SV=1
MKQLSGLLGELRQKLCAGFPEQAGIQQLIFPAPGLVGRQLLEWLTAQTHFPQFYWRHRDNHEEAAVCGQTRSFADMKDADDFIQQNPDANGLRIWGLNAFEPVMVFGQLTDNGLVSGKNAQASFLFLPRLEILRRGKKTSLTLNLSSETSLQKDALQAITFIDQLMAARALPVLNARIQHSSHTPGYPQWRNLIQQALNDIEQQKLDKVVLARTTTLTLNKPLSCAAFMAASRQVNHRCYHFMLRFDDRQAFLGSSPERLYLRQQLHLETEALAGTVSNLDSDPQAAVLADWLMHDEKNQRENLLVVDDICQRLQGGVTAVDVMPPEIIRLRKVQHLRRRICAQLSRASDTDCLQRLQPTAAVAGLPREAARQFIAKHELFSRGWYAGSAGYLSLKRTEFSVALRSARVDGQQIHLYAGAGIVAGSDAEQEWQEIDNKSAGLQSLLEHEAQPVKA

SEQ ID NO: 95211 - protein, 455 aa, Yersinia pseudotuberculosis
  misc_feature (1)..(455): tr|A0A0T9JGG5|A0A0T9JGG5_YERPU Isochorismate synthase M enF OS=Yersinia pseudotuberculosis OX=633 GN=menF PE=3 SV=1
MKQLSGLLGELRQKLCAGFPEQAGVQQLILPVPGSVGRQLLEWLTAQAHFPQFYWRHRDNHEEAAVCGQACSFADVKSADDFIQQNPDANGLRIWGLNAFEPVMVFGQPTDNGLASGQNPQTSFLFLPRIEILRRGEQTSLTLNLSSDTSLQKDALRAITFIDQLMAARSLPVLNARIRHASHTPGYPQWRNLIQQALNDIEQQKLDKVVLARTTTLTLNKPLSCAAFMAASRQVNHRCYHFMLRFDDRQAFLGSSPERLYLRQQLHLETEALAGTVSNIASDPQAAILADWLMHDEKNQRENLLVVDDICQRLQGGVTAVDVMPPEIIRLRKVQHLRRRICAQLSRASDTDCLQRLQPTAAVAGLPREAARQFIAKHEPFSRGWYAGSAGYLSLKRTEFSVALRSARVDGQQIHLYAGAGIVAGSDAEQEWQEIDNKSAGLQSLLEHEAQPVKA

SEQ ID NO: 95212 - protein, 451 aa, Yersinia rohdei
  misc_feature (1)..(451): tr|A0A0U1HVY0|A0A0U1HVY0_YERRO Isochorismate synthase M enF OS=Yersinia rohdei OX=29485 GN=menF PE=3 SV=1
MKQLSGLLGELRQKLRAGFPEQAGIRQIILPAPGLVGSQLLEWLAVQCHFPQFYWQHREGHEETAVCGQIRQFNDVASAERFIQQHSAVAGLRVWGLNAFEPVSITDPSASSPPQLQTSFLFLPRIEISRRGHHTHLTLNLVSDFSLQQDAALAITFIDQLVAAKPLPALDAVVEHASHMPEYPQWSGLIQRALGNIEQQKMEKVVLARATRLMLDKPLSCTAFMAASRQVNHHCYHYMLRFDAVRAFLGSSPERLFQRQLLHLETEALAGTVSNDENSVQATELANWLMHDEKNQRENLLVVDDICQRLQGGVEAVDVMPPEVIRLRKVQHLRRRIHARLNLASDTDCLQRLQPTAAVAGLPRNIARQFIAENEPFSRGWYAGSAGYLSLKQTEFSVTLRSAWVEDSQIHLYAGAGIVAGSDPQQEWQEINNKSAGLRTLLTNQQQDNKA

SEQ ID NO: 95213 - protein, 398 aa, Yersinia ruckeri
  misc_feature (1)..(398): tr|A0A0A8VG89|A0A0A8VG89_YERRU Isochorismate synthase o f siderophore biosynthesis OS=Yersinia ruckeri OX=29486 GN=entC PE=4 SV=1
MAQSGTEEHLVNPLFSATSSAFLFTSAHRSIKTEGIAERITQKAQDGADYLSALQASIKQAFIRARADGQSQPIVVGVFPFDTTQATQLFIPQSYQFIHRQDLVDCAVNDQRSPISVVNWRSLPNEPEFKQAVSRAVETFRRGKIHKAVLSRILEIETETPINTNQVINHLLRQNPGAYHFHVPLAEGGVLLGASPELLVRKDGNQVYTNPLAGSAKRQNDVENDLAVSQALLNSGKDQYEHRLVIDEIRRLLAPYCRSLNIPTQPSLIHTAALWHLSTAISGELETSQISVLQLACLLHPTPALCGLPTALARQLISQLEPFDRGLFSGIVGWSDEQGNGEWAVVIRCATVDKTQVRLFAGAGIVMASQPALEWAETEAKLGTMLNALGIQPQGSLP

SEQ ID NO: 95214 - protein, 455 aa, Yersinia similis
  misc_feature (1)..(455): tr|A0A0T9Q3L5|A0A0T9Q3L5_9GAMM Isochorismate synthase M enF OS=Yersinia similis OX=367190 GN=menF PE=3 SV=1
MKQLSGLLGELRQKLCASFPEQAGIQQLILPAPGSVGRQLLEWLTAQAHFPQFYWRHRDNHEEAAVCGQTRSFADVKDADDFIQQNPDANGLRIWGLNAFEPVMAFGQPTNNGLVCGQNPQASFLFLPRIEILRRGEQTSLTLNLSSDTSLQKDALRAIEFIDQLMAARALPVLNARIQHASHTPEYPQWRNLIQQALNDIEQQKLDKVVLARTTALTLNKPLSCAAFMAASRQVNHRCYHFMLRFDDRQAFLGSSPERLYLRQQLHLETEALAGTVSNIDSDPQAAVLADWLMHDEKNQRENLLVVDDICQRLQGGVTAVDVMPPEIIRLRKVQHLRRRICAQLSRASDTDCLQRLQPTAAVAGLPREAARQFIAKHEPFSRGWYAGSAGYLSLKHTEFSVALRSARVDGQQIHLYAGAGIVAGSDAEQEWQEIDNKSAGLQSLLEHEAQPVKA

SEQ ID NO: 95215 - protein, 455 aa, Yersinia wautersii
  misc_feature (1)..(455): tr|A0A0E8XJB3|A0A0E8XJB3_9GAMM Isochorismate synthase M enF OS=Yersinia wautersii OX=1341643 GN=menF PE=3 SV=1
MKQLSGLLGELRQKLCAGFPEQAGVQQLILPVPGSVGRQLLEWLTAQAHFPQFYWRHRDNHEEAAVCGQACSFADVKSADDFIQQNPDANGLRIWGLNAFEPVMVFGQPTDNGLASGQNPQTSFLFLPRIEILRRGEQTSLTLNLSSETSLQKDALRAITFIDQLMAARSLPVLNARIQHASHTPGYPQWRNLIQQALNDIEQQKLDKVVLARTTTLTLNKPLSCAAFMAASRQVNHRCYHFMLRFDDRQAFLGSSPERLYLRQQLHLETEALAGTVSNLDSDPQAAVLADWLMHDEKNQRENLLVVDDICQRLQGGVTAVDVMPPEIIRLRKVQHLRRRICAQLSRASDTDCLQRLQPTAAVAGLPREAARQFIAKHELFSRGWYAGSAGYLSLKRTEFSVALRSARVDGQQIHLYAGAGIVAGSDAEQEWQEIDNKSAGLQSLLEHEAQPVKA

SEQ ID NO: 95216 - protein, 436 aa, Yersiniaceae bacterium
  misc_feature (1)..(436): tr|A0A2N5E1Y5|A0A2N5E1Y5_9GAMM Isochorismate synthase M enF OS=Yersiniaceae bacterium 2016Iso4 OX=2060068 GN=me nF PE=3 SV=1
MMQALEQTLQDETLCRASGVRQLILTFYHPENRHPESAPLLGWLAAQPHFPKFYWQPRDGTETVAVCGQVAQFSDAQQAGQFLHHHAGHAGRLRVWGLNAFEAAPQPACLFVPRLTLHQQANTLTLTLNLADPHALQGDLVRAAAFLQQLQPATLLPPQPLSLTHASHQPDEAGWHALLQHALAGIAAGEMEKVVLARKTVLTFSQPVDAWRMLAASRQVNHHCYHFLMAFSPTAAFLSASPERLFLRQGDQLTTEALAGTVASSEDDHQAAVLAGWLMKSEKNQRENWLVVDDICRQLQGAAHGLDVMPPEIVRLRKVQHLRRTIHGQIRAADDALCLARLQPTAAVAGLPRLPARRFILSHEPFPRGWYAGSAGYLSREQSEFAVSLRSAWLEEHQVHLYAGAGIVAGSDPAQEWQEIENKAAGLRTLLEDPAE

SEQ ID NO: 95217 - protein, 426 aa, Yimella sp.
  misc_feature (1)..(426): tr|A0A4Q3XQL3|A0A4Q3XQL3_9MICO Isochorismate synthase O S=Yimella sp. RIT 621 OX=2510323 GN=EU513_07355 PE=4 SV =1
MTFPLADATPPTLVARTTQIPDPIDLSLLVPDDVAPQDIVCWLRGGEGLIGWGRAASITTSGADRFDAATQWWQDVTASAVVRTDLDLPGTGPIAFGTFAFSRRSGQTSTLVVPEVVVGRREGRCWITQIATADRLPGTPARVERHEPRTTGETAFESGSLSRDEWADAVAESVQRIQHGDLDKVVMARDVVARSATPIDPRRLLHRLSQTYSNTWTFAVDGMLGATPEMLLRREKGLVTSRVLAGTIRRSGDDEHDLGLAAGLARSSKDLEEHEYAVRSVAEALRPHCKSMNVPESPFVLHLPNVMHLATDVTGVLRNGTPSLALAAALHPSAAVCGTPTGMAAEVIHELERMDRGRYAGPVGWLDADGDGEWGIALRSGMLDPEDPCRIRLFAGCGIVAGSIPEAELAESDAKLLPMRSALADD

SEQ ID NO: 95218 - protein, 391 aa, Yokenella regensburgei
  misc_feature (1)..(391): tr|A0A2X2PV57|A0A2X2PV57_9ENTR Isochorismate synthase e ntC OS=Yokenella regensburgei OX=158877 GN=entC PE=4 SV =1
METSLAEDVLDETTTLSPDSFFFMSPYRSFTTSGCFSRVSTPVEGGDDLNSAFQQSISTAFREAKAAGIRKPVMVGAIPFDTTQPSALFIPQQWQTFSRTSRQHAARYAAALPEMNVTERQEIPPQDGFMSMVASAAGLTATPEVDKVVLSRLIEISTDAPLDSGALLERLIAQNPASYNFHIPLPDGGVLLGASPELLLRKEGRHYSSLPLAGSARRQPDDMLDREAGNKLLASEKDRHEHELVTQAMKAVLAPRSKILELPDSPQLVTTPTLWHLATPIEGIAHDEENALSLACLLHPTPALSGFPHQVAKRLISELEPFDRELFGGIVGWCDDEGNGEWVVTIRCARVRENQVRLFAGAGIVPASSPLSEWRETGVKLSTMLNVFGLH

SEQ ID NO: 95219 - protein, 371 aa, Zobellia galactanivorans
  misc_feature (1)..(371): tr|G0L7M5|G0L7M5_ZOBGA Menaquinone-specific isochorisma te synthase OS=Zobellia galactanivorans (strain DSM 128 02 / CCUG 47099 / CIP 106680 / NCIMB 13871 / Dsij) OX=6 3186 GN=menF PE=4 SV=1
MPLDFFDKIDSHLEKELPFVAYRKPNEESVKAIFQNDDGLLHLNDYSETGFVFAPFDSDAPAILLRLDEVLHLDAFPDKTNSPSKNIGEEPGEEQHAFHLDLVKKGIADIKAGKFDKVVLSRSITVKTDTAPLSLFQALLHQYKTAFCYLWYHPKVGMWLGATPEILLTFHNRKLTTMSLAGTQDYTDNVNPTWGNKELEEQQLVTNYILKALEGKVSNLERTPTESVKAGALMHLRTKISGNATQENLGAIINALHPTPAVCGMPKGETKAFILREENYDREFYTGFLGELNFKTERNRNTRPGNTENNVYRSISKNTTLFVNLRCMQRINDTIQIYVGGGITKDSDPEKEWGETVAKSKTMLKVILATE

SEQ ID NO: 95220 - protein, 482 aa, Zooshikella ganghwensis
  misc_feature (1)..(482): tr|A0A4P9VRH9|A0A4P9VRH9_9GAMM Isochorismate synthase O S=Zooshikella ganghwensis OX=202772 GN=B9G39_15595 PE=4 SV=1
MIDCQTVKGGLAKLEKLVNTYCIKGTSWPIICRVRLPINSDVTQWPSWLAAQSVVPQLFWQQREHKLTVAALGSADTLKDRGLVSQLNARVEQRLACPVIGDGTPKYWGGAGFDQAQTWQDFPGALFFLPSLSLEAQGGQQHLVFQTYLTHAEQWPIKQQALRKLVSCLCWSMQEQASLPRYVHLHDEPNAKRWQQQVRASLAAIKKGQCDKVVLSRRRRLIFNQQVTPWQLLAMWQASQQHLSYPFCLSLRPGEGFVGCSPEQLFSLDNKELTTEALAGSMAKHADPERDIQYSNALFESAKLQQENQWVVKYIQQQLALLVSQQTLGPLSVKTLPYIHHLFQPIKAQLLPSTSVADILTALHPTPAVKGFPANAAEQMISQLETYPRGWYAGVLGFWSRNQAEFCVTIRSAHVHRKANNRCGDKSTQPEQSYHYLVDLFSGAGLVDGSVASQEWQELDQKLSQFMEYMQHAATDNAIAQF

SEQ ID NO: 95221 - protein, 99 aa, Acaryochloris sp.
  misc_feature (1)..(99): tr|A0A2W1JZ52|A0A2W1JZ52_9CYAN Isochorismate pyruvate l yase OS=Acaryochloris sp. RCC1774 OX=1764569 GN=pchB_1 PE=4 SV=1
MVAPHNCENMSDIRAEIDALDRQIIALLGQRFEYVKAAAPFKSSAKDVRAQERFDTMLQQRRIWAETEGLEADVIEKMYRDLVTYFIEAELQHWRSELS

SEQ ID NO: 95222 - protein, 127 aa, Achromobacter agilis
  misc_feature (1)..(127): tr|A0A446CW79|A0A446CW79_9BURK Isochorismate pyruvate l yase OS=Achromobacter agilis OX=1353888 GN=pchB PE=4 SV =1
MTNQEPDAQGAPLRAYTDPSYRPLCATLADVRANIDRLDDDIVRLIAERAMYVKDAARFKRDAFQVSAPARQAQVFEKARRLAERHNQGFANLDQVVDATYRAMVAAFIANEQTYFNSMKDLGDTHA

SEQ ID NO: 95223 - protein, 127 aa, Achromobacter sp.
  misc_feature (1)..(127): tr|A0A446CG62|A0A446CG62_9BURK Isochorismate pyruvate l yase OS=Achromobacter sp. LMG 30378 OX=2069367 GN=pchB PE=4 SV=1
MTNQEPDAQGAPLRAYTDPAYRPLCATLADVRANIDRLDDEIVRLIAERAMYVKDAARFKRDAFQVSAPARQAQVFDKARQLADRHNRGFANLEQVVDATYRAMVAAFIANEQTYFNSMKDLGDTHA

SEQ ID NO: 95224 - protein, 105 aa, Acidithiobacillus thiooxidans
  misc_feature (1)..(105): tr|A0A543Q1D0|A0A543Q1D0_ACITH Isochorismate pyruvate l yase OS=Acidithiobacillus thiooxidans ATCC 19377 OX=637 390 GN=pchB PE=4 SV=1
MSNVINFTSIEEARSNIDRIDCQIVTLLDERGSFVKQAAQFKKTTDDVKAPQRVEQVIAKVTALSQELGANTSVTEQVYRAMISSFINAELTEYAALNTGETKHY

SEQ ID NO: 95225 - protein, 111 aa, Altererythrobacter sp.
  misc_feature (1)..(111): tr|A0A369Q4P0|A0A369Q4P0_9SPHN Isochorismate lyase OS=A ltererythrobacter sp. HME9302 OX=2161824 GN=pchB PE=4 S V=1
MPDNETALTREAAATMPDECMTMAEVRRGVDATDRELFALLERRFGYMRAAARIKQDRGEVRDEARKAAVIAAIREDAVQAGLPARELAEIWEKLVEASIAYEFAEWDRIR

SEQ ID NO: 95226 - protein, 103 aa, Unknown
  misc_feature (1)..(103): tr|A0A5J4DT06|A0A5J4DT06_9BACT Isochorismate pyruvate l yase OS=bacterium MnTg02 OX=2080452 GN=pchB PE=4 SV=1
MSVCPPQDCRSMDEVRTEIDRIDQALVDLIAERFGYVDRAWQLKDRPDEAVVPWRIQQVIDRVKKRAVEKDLPPELAEAIWRQMIGWFIQYEEVKLNETNGKP

SEQ ID NO: 95227 - protein, 110 aa, Brevibacterium antiquum
  misc_feature (1)..(110): tr|A0A2H1HT87|A0A2H1HT87_9MICO Isochorismate pyruvate l yase OS=Brevibacterium antiquum CNRZ 918 OX=1255637 GN= BANT918_00442 PE=4 SV=1
MTELSPPRYNSSMSETRAVDPDLQQVRAKIDSLDRQIIQLIAERQKWVVRASSLKKDESAVRAPDRVEQVITKARTLASDAQASPDVVEATYRAMIDAFISLELDHHRNH

SEQ ID NO: 95228 - protein, 110 aa, Brevibacterium antiquum
  misc_feature (1)..(110): tr|A0A2H1JRT2|A0A2H1JRT2_9MICO Isochorismate pyruvate l yase OS=Brevibacterium antiquum OX=234835 GN=BANT10_023 01 PE=4 SV=1
MTELSPPRYNSSMSETRAVDPDLQQVRAKIDSLDRQIIQLIAERQKWVMRASSLKKDESAVRAPDRVEQVITKARTLASDAQASPDVVEATYRGMIDAFISLELDHHRNH

SEQ ID NO: 95229 - protein, 106 aa, Ensifer sp.
  misc_feature (1)..(106): tr|A0A395L636|A0A395L636_9RHIZ Isochorismate pyruvate l yase OS=Ensifer sp. M14 OX=2203782 GN=pchB PE=4 SV=1
MQKTPAECTDMADVRAEIDRLDQALMALFAERWGYIDRAAEIKRPLKLKADIPSRVMEVRENARKNAERRNLDPDFYEEIWARLINHAIAHEQKILGETDGDDQAR

SEQ ID NO: 95230 - protein, 434 aa, Escherichia coli
  misc_feature (1)..(434): tr|A0A192C8S8|A0A192C8S8_ECOLX Irp OS=Escherichia coli O25b:H4 OX=941280 GN=WLH_00825 PE=4 SV=1
MKISEFLHLALPEEQWLPTISGVLRQFAEEECYVYERQPCWYLGKGCQARLHINADGTQATFIDDAGEQKWAVDSIADCARRFMAHPQVKGRRVYGQVGFNFAAHARGIAFNAGEWPLLTLTVPREELIFEKGNVTVYADSADGCRRLCEWVKEAGTTTQNAPLAVDTALNGEAYKQQVARAVAEIRRGEYVKVIVSRAIPLPSRIDMPATLLYGRQANTPVRSFMFRQEGREALGFSPELVMSVTGNKVVTEPLAGTRDRMGNPEHNKAKEAELLHDSKEVLEHILSVKEAIAELEAVCQPGSVVVEDLMSVRQRGSVQHLGSGVSGQLAENKDAWDAFTVLFPSITASGIPKNAALNAIMQIEKTPRELYSGAILLLDDTRFDAALVLRSVFQDSQRCWIQAGAGIIAQSTPERELTETREKLASIAPYLMV

SEQ ID NO: 95231 - protein, 456 aa, Gordonia rubripertincta
  misc_feature (1)..(456): tr|A0A222TDW2|A0A222TDW2_GORRU Isochorismate synthase/i sochorismate lyase OS=Gordonia rubripertincta OX=36822 GN=mbtI PE=4 SV=1
MSLTTDSRTSRIDAAELGLDPAAGLIAPATPLTEAVAARISAAWAGSGEFGDHVVYERNRRWTFAAGVNVRVVVTRGEVIVDDRGRRTTTAWHGDPADALAAATEALPIPDWRLYGWVGFDFCAPYHGILDRVPDDTVLAHLIVPEFEAFVDADGVDTGTADPERARRLLEIAATAGDPGTSRPVDVRVDTEDYRGRVAAAVSEIAAGRYQKVILSRAVDIPFAVDIPATYARGRADNTPARSYLLSLGDLSAAGFSPELVVAVHADRTVVTEPLAGTRAFGVSADQDAAARAELLGDAKEVAEHAMSVRACYDEIASISAAETTAVSTFMEVRERGSVQHLASTVKGTLAEGESPWRALEVVFPSITASGVPKTAAVDAIDRLESRRRGPYSGAVLVASSSGELEATLALRTVFSSGGKAWLRAGAGIVAQSTPEREFEETCEKLGSVAPYVIPR

SEQ ID NO: 95232 - protein, 461 aa, Grimontia marina
  misc_feature (1)..(461): tr|A0A128FKJ2|A0A128FKJ2_9GAMM Isochorismate synthase/i sochorismate lyase OS=Grimontia marina OX=646534 GN=mbt I PE=4 SV=1
MTQYKELTLPTSAKTSRLLLSIANSGLADQFMIYEKPGEWSLGMGNLLSIDVYKNEIVVKQEDRIQIMGYEDFEPALTHITQNLPVENWRLYGQAKFELAYVFYGLTNTISLDKTNKLMSLFIPEYEVRISDKTATLRATSPAGLEKLVELFRLAERREKHGYDTDFVIEHVDLTIPSSCEYYKTAVQQAIADIQENHYQKVILSRQVQVSFPLDMAKSYEYGRQKNTPARSFILRQSGFEAAGFCPETVLEASPDGWVSTQPLAGTRSLGNSPEEELQLKSELISTTKEIAEHAISVRLAYEELDHVCDEESLSVCDFMSIKRRGSVQHLASRVKGKLSSNHSVWDAFKALFPAVTASGIPKKESLLAIKKYEASERALYSGSVMIVDPDGAMDAGLVLRSIYKDEEKCWLQAGAGIVDQSLPERELTETIEKLSCIAQYLVQDLQEPMPSIEHSKKETV

SEQ ID NO: 95233 - protein, 95 aa, Unknown
  misc_feature (1)..(95): tr|A0A3B1CTA0|A0A3B1CTA0_9ZZZZ Isochorismate pyruvate-l yase OS=hydrothermal vent metagenome OX=652676 GN=MNBD_ NITROSPINAE02-760 PE=4 SV=1
MTVDDCKNLADVRENIDRLDQRIIELMAERSQYVARAARFKKDYKEVEDPSRVEQVIENKKALAIKYGLSPYVAEQTYRAMIAAFIEFEKKEFTK

SEQ ID NO: 95234 - protein, 140 aa, Janthinobacterium sp.
  misc_feature (1)..(140): tr|A0A1A7C4Z9|A0A1A7C4Z9_9BURK Isochorismate pyruvate l yase OS=Janthinobacterium sp. S3-2 OX=1747903 GN=ASR47_ 101434 PE=4 SV=1
MRLSLMTVFLLAAGTAQAQAPAATPAAPWGSPTVGNGACCQSIDEVRGHIDRIDAEIVRLMAERGRYVHEAARFKPDPTHVEVPARAEAVVRKAMALAQQNGLSPQIAEATYRPMLRAYLDYEQQVFAKASAAGQTPWQK

SEQ ID NO: 95235 - protein, 124 aa, Labrenzia alexandrii
  misc_feature (1)..(124): tr|A0A5E8H614|A0A5E8H614_LABAD Chorismate mutase OS=Lab renzia alexandrii (strain DSM 17067 / NCIMB 14079 / DFL -11) OX=244592 GN=SADFL11_4916 PE=4 SV=1
MFAKQERMTDIKRPADCHTKADIRTAIDALDQDLLKLFAQRQGYVRRMAELKQRPDEAFDHDRIETMVAALKNRAEDLGLEADQAEQVWRVLIDWNVAYEKRTIAARLEKGQAPNTSWVSKETR

SEQ ID NO: 95236 - protein, 434 aa, Mycobacterium marinum
  misc_feature (1)..(434): tr|A0A2Z5YID1|A0A2Z5YID1_MYCMR Isochorismate synthase/i sochorismate lyase OS=Mycobacterium marinum OX=1781 GN= mbtI PE=4 SV=1
MPADIDPADLAAELAAVLCEAVRPEGTQYLLYERDGQWVLASGVQAMVELDSDEVRVIRDGVTQRQQWSGRPGEVLGEAIDRLLLETDQVFGWVAFEFGLYRYGLQARLAPGTPLARVFWPRTRIVVTRDDVSLFGAEPHEREAVLRLLRDGLPTVPRSRTIDLSADPSGYRDRVAVAVREIASGAYHKVILSRCVEVPFRLDFPSTYRRGRERNTPVRSFLLRLGGIRALGFSPELVTAVSPSGVVVTEPLAGTRALGRGAAHDRLARGDLESNAKEIVEHAISVRTSLHEITEVAEPGTAAVIDFMSVRERGSVQHLGSTISARLDAASDRMNALEALFPAVTASGIPKADGVDAILRLDEGPRGLYSGAVVMLSADGGLDAALTLRAAYERDGRTWLRAGAGIIEASQPEREFEETCEKLSTLAPYLVERQ

SEQ ID NO: 95237 - protein, 450 aa, Mycobacterium tuberculosis; identical to SEQ ID NO: 94322
  misc_feature (1)..(450): sp|P9WFX0|MBTI_MYCTO Salicylate synthase OS=Mycobacteri um tuberculosis (strain CDC 1551 / Oshkosh) OX=83331 GN =mbtI PE=3 SV=1

SEQ ID NO: 95238 - protein, 450 aa, Mycobacteroides franklinii
  misc_feature (1)..(450): tr|A0A4R8R9H9|A0A4R8R9H9_9MYCO Isochorismate synthase/i sochorismate lyase OS=Mycobacteroides franklinii OX=948 102 GN=mbtI PE=4 SV=1
MSAVVDPDTGARTWVSVQEGLPDGFAPADLASVLAQEIPERQGDEYLIYERDGEWVLAIGARASVELDSDGLRILRDGSVEKRGWSGHPGAALEVAVNEISDGVHRVFGWVAFEFGTYRFNLQHRLAPGTPLARVFTPRAEVVITADGVSVSDERYVDEISRLIDQGAPAIPAPASIDLVPDPSDYRGRVGIATAEIRSGLYHKVILSRRVEVPFAMDFPSTYRLGRHNNTPVRSFLLRLGGIRALGYSPELVTAVEADGTVITQPLAGTRAFGRGADADRVARDDLESNAKEIVEHAISVRSSLAEIAEVVDPGSTKVTDFMTVRERGSVQHLGSTVSGELSPGMTRMDALEALFPAVTASGIPKAEGVDAILRLDDHPRGLYSGAVLMMYPNGGLDAALTLRSAYEHDGHTWLRAGAGIIEASTPEREFEETCEKLGSIAPYVIKREA

SEQ ID NO: 95239 - protein, 450 aa, Mycobacteroides salmoniphilum
  misc_feature (1)..(450): tr|A0A4R8S4J7|A0A4R8S4J7_9MYCO Isochorismate synthase/i sochorismate lyase OS=Mycobacteroides salmoniphilum OX= 404941 GN=mbtI PE=4 SV=1
MSTVADSDTGAQTWVSVQEGLPDGFAPADLASVLAQEIPERHGDEYLVYERDGEWVLAIGARASVELDSDGLRIIRDGSVEQRGWTGHPGAALEQAVNEISDGVHRVFGWVAFEFGTYRFGLQHRLTPGTPMARVFAPRAEVVITADGVSVCEESYVEEIRRVLDQGAPAVPASESIDLVPDPSDYRGRVGIATAEIRSGLYHKVILSRRVEVPFAMDFPSTYRLGRHNNTPVRSFLLRLGGIRALGYSPELVAAVEADGTVITQPLAGTRAFGRGEDADRVARDDLESNAKEIVEHAISVRSSLAELGEVAELGSTKVTDFMTVRERGSVQHLGSTVSGALSAGMTRMDALEALFPAVTASGIPKAEGVDAILRLDDHPRGLYSGAVVMMSPDGGLDAALTLRSAYEQDGHTWLRAGAGIIEASTPDREFEETCEKLGSIAPYVIKREV

SEQ ID NO: 95240 - protein, 466 aa, Nocardia seriolae
  misc_feature (1)..(466): tr|A0A0B8N3I2|A0A0B8N3I2_9NOCA Isochorismate synthase O S=Nocardia seriolae OX=37332 GN=mbtI PE=4 SV=1
MLTSLGKLGKHNLGGLVSVADERVRVTGEQRWGEHVTDPAAAVSALAAAELFGEYVVYERPGEWVFAADPIGGVELDADELRVSWDGRTTAGPWTGSPAQAVDRALAGLPSAGRNAFGWIGFEFCAWSLGAIEHVHPRATLAHLMIPRIEVRIDATGVRVSGATPAETGDIHELITTAQRTAPPVAHPVDVTGDPTGYRDRVAAGVAEIADGRYQKVILSRKVELPFAVDIPATYRLGRMNNTPARSFLLRLGGLEAAGFSPELVASVDRDRVVTTEPLAGTRAFGRGDDLDLAARAELIRDPKEIVEHAISVQTSFAEIAAVAEPDTTAVSDFMAVRERGSVQHLASTVRGTLAAGRSPWDALETLFPSVTASGIPKAEGVDAVFRLDHDPRGLYSGAVVTVSPEGELEATLVLRAVYQSGAGAWLRAGAGVVGQSRPEREFEETCEKLGSVAPYVVKADTAVRA

SEQ ID NO: 95241 - protein, 99 aa, Paenibacillus nuruki
  misc_feature (1)..(99): tr|A0A1E3KXX6|A0A1E3KXX6_9BACL Isochorismate lyase OS=P aenibacillus nuruki OX=1886670 GN=pchB PE=4 SV=1
MRDCQNLDEVRERIDQLDQHIIQLLSERSQYVRQAAAFKKDKDAVKAPARVESVIHKVRQLAVEHALNPSIAEKVYRAMIAGFIEDELQEHERINPSNR

SEQ ID NO: 95242 - protein, 100 aa, Paracoccus yeei
  misc_feature (1)..(100): tr|A0A386UNB9|A0A386UNB9_9RHOB Chorismate mutase OS=Par acoccus yeei OX=147645 GN=PY32053_02463 PE=4 SV=1
MTDEPILPPDSAMHALRARIDELDSRLVALLSERAALIDEAARIKLREGLPARIDSRVEEVAANARRLAEEKGLDPGLAESLWRMMMEHFIAQEDRLLSR

SEQ ID NO: 95243 - protein, 127 aa, Phormidesmis priestleyi
  misc_feature (1)..(127): tr|A0A0P8C5P5|A0A0P8C5P5_9CYAN Isochorismate pyruvate l yase OS=Phormidesmis priestleyi Ana OX=1666911 GN=pchB PE=4 SV=1
MTFYRHFTATEWEPKVGYCRALRAENFIYLSGTAPIDEDGNTFAPGDAYAQACRCFEIIRDTLQAMGSGLHQTVRTRMYVTDISQWQAFGKAHQEFFGEHPPVTTMVEVKALIAPDMLIEVEAEAIA

SEQ ID NO: 95244 - protein, 97 aa, Pontivivens insulae
  misc_feature (1)..(97): tr|A0A2R8A8N6|A0A2R8A8N6_9RHOB Isochorismate pyruvate l yase OS=Pontivivens insulae OX=1639689 GN=pchB PE=4 SV= 1
MTDPATCRNMTELRAGIDALDIELMKLLARRVSFIDRAIELKPAEGIKARAEDRVLAVLANARRNATQQGFDPDLAESLWREMIEWSIAREEVVLGK

SEQ ID NO: 95245 - protein, 101 aa, Pseudomonas aeruginosa
  misc_feature (1)..(101): sp|Q51507|PCHB_PSEAE Isochorismate pyruvate lyase OS=Ps eudomonas aeruginosa (strain ATCC 15692 / DSM 22644 / C IP 104116 / JCM 14847 / LMG 12228 / 1C / PRS 101 / PAO1 ) OX=208964 GN=pchB PE=1 SV=2
MKTPEDCTGLADIREAIDRIDLDIVQALGRRMDYVKAASRFKASEAAIPAPERVAAMLPERARWAEENGLDAPFVEGLFAQIIHWYIAEQIKYWRQTRGAA

SEQ ID NO: 95246 - protein, 101 aa, Pseudomonas aeruginosa
  misc_feature (1)..(101): tr|A0A2R3J0Z6|A0A2R3J0Z6_PSEAI Isochorismate lyase OS=P seudomonas aeruginosa OX=287 GN=pchB PE=4 SV=1
MKMPEDCTGLADIREAIDRIDHDIVLALGRRMDYVKAASRFKASEAAIPAPERVAAMLPERARWAEENGLDAPFVEGLFAQIIHWYIAEQIKYWRQTRGAA

SEQ ID NO: 95247 - protein, 100 aa, Pseudomonas fluorescens
  misc_feature (1)..(100): tr|A0A5E7C657|A0A5E7C657_PSEFL Isochorismate pyruvate l yase OS=Pseudomonas fluorescens OX=294 GN=pchB_2 PE=4 S V=1
MAVTCTTLEQVRENIDRLDGQIVALLAERGSFVSQAARFKKDSDGVKAPQRVEQVINKVRELSHTLGANPDVTEQVYRAMISAFIQQELAEHAALTQPTT

SEQ ID NO: 95248 - protein, 109 aa, Pseudomonas fuscovaginae
  misc_feature (1)..(109): tr|A0A0M9GCA2|A0A0M9GCA2_9PSED Chorismate mutase-like e nzyme OS=Pseudomonas fuscovaginae OX=50340 GN=PF66_0592 8 PE=4 SV=1
MPTVNLKTPEACLDLNDIRDGIDALDHQILETLQQRLRYVKAAARFKPSEQSIPAPERVAAMLAERRQWAEAAGLEVGFIEKLYEQIIHWNIQQQILHWRATYPERVQA

SEQ ID NO: 95249 - protein, 106 aa, Pseudomonas sp.
  misc_feature (1)..(106): tr|A0A2N7R696|A0A2N7R696_9PSED Isochorismate pyruvate l yase OS=Pseudomonas sp. AD21 OX=396378 GN=pchB PE=4 SV= 1
MEVINNLQPEACAGMEEIRREIDALDQAVIQLLGKRFHYVLAASKFKTSATSVRAPERFKAMLVTRREWAEAEGLNPDAIEKMYSDLVNHFIAEEMKHWAAHQADT

SEQ ID NO: 95250 - protein, 102 aa, Pseudomonas synxantha
  misc_feature (1)..(102): tr|A0A3G7UPW1|A0A3G7UPW1_9PSED Isochorismate pyruvate l yase OS=Pseudomonas synxantha OX=47883 GN=C4K02_2264 PE =4 SV=1
MKTPEHCTGLHDIRHAIDSLDQQIIDALGLRMQYVKAASAFKPDQASIAAPERVAAMLPQRRQWAQDVGLDGEFIESLFNQIIHWYIAEQTAFWLQKKSKAV

SEQ ID NO: 95251 - protein, 106 aa, Pseudomonas syringae
  misc_feature (1)..(106): tr|A0A0K8M9I7|A0A0K8M9I7_PSESF Chorismate mutase OS=Pse udomonas syringae pv. actinidiae OX=103796 GN=pchB PE=4 SV=1
MNVVKSAPECENLGDIRQGIDDLDRQIVQILARRLTYVKAATRFKASQQAIPAPDRVRAMLEERRQWAHDAGLPVDETEDFFKDLIHWFINQQITHWRVLHPEAQP

SEQ ID NO: 95252 - protein, 101 aa, Pseudomonas wadenswilerensis
  misc_feature (1)..(101): tr|A0A380SZ34|A0A380SZ34_9PSED Isochorismate pyruvate l yase OS=Pseudomonas wadenswilerensis OX=1785161 GN=pchB 1 PE=4 SV=1
MKSPDACEGLPDIRIAIDSLDHQIIELMRQRMAYVKAAARFKPTESSIAAPERVAQMLPQRRQWAEEAGLDAHFVETLFAQIIHWYIAQQVRHWRTMRVPA

SEQ ID NO: 95253 - protein, 467 aa, Rhizobium etli
  misc_feature (1)..(467): tr|A0A1L5PA15|A0A1L5PA15_RHIET Isochorismate synthase/i sochorismate lyase/chorismate mutase OS=Rhizobium etli 8C-3 OX=538025 GN=mbtI PE=4 SV=1
MTVFTSGIAQSNAAYVVPLAVDAVTAAASLASAVEGDALTSPQPAKNRAGAEPYILYEKAGEISFAAGSMMEIRLDRAGLQLTTPTGSRREPLTDRPLRQVQAMLASVLSIQKGSQPRVFGWAAFELSYLLQGLPIADDVGTLLYLFVPQHEARIRSGEADLRVSDPQVAELWLTALRNAEPNDPSERIHVDEVSDATGYVDAAREAIKAIDGSKLRKIILSRSVFLAEEVDLVASYRTLRRNNTPVRSFLLRLGGIAAAGVSPGAIIEVSATGAVVTQPLAGTRAYTGQPELDASLRDELLSDPKEIYEHALSVKLAQDEIAAVSQPGTVFVEDFMHVVSRGSVQHLASRVRGQLRSDASCWDALGSVFPAVTASGIPKRDACREISLREQSARGLYSGAVLAIDGSGQFDAALVLRSVYQVEGATWLRAGAGLISQSNAERELEETREKMRSVSRFLVPRSGSTA

SEQ ID NO: 95254 - protein, 103 aa, Roseibaca ekhonensis
  misc_feature (1)..(103): tr|A0A3B0MKP0|A0A3B0MKP0_9RHOB Isochorismate pyruvate l yase OS=Roseibaca ekhonensis OX=254356 GN=pchB_1 PE=4 S V=1
MPDPKSCTDMAQLRAQIDQIDRELVTLLTQRAAHIDRAIELKPGEGLPARIDARVRDVLDRVAAEATTQGLDPALARALWSELIDWSIAREERVLGATRKGTA

SEQ ID NO: 95255 - protein, 103 aa, Rubellimicrobium thermophilum
  misc_feature (1)..(103): tr|S9QWR6|S9QWR6_9RHOB Chorismate mutase OS=Rubellimicr obium thermophilum DSM 16684 OX=1123069 GN=ruthe_01567 PE=4 SV=1
MKRPADCKTMADIRAEIDRVDRELVRLLAERTGYIDRAAEIKGPLQMPARIASRVEEVVANVRREAVAQGLPPDLIEKLWRRLIDWSIAREEGVLGPEWEDHP

SEQ ID NO: 95256 - protein, 98 aa, Salipiger profundus
  misc_feature (1)..(98): tr|A0A1U7D2G2|A0A1U7D2G2_9RHOB Isochorismate pyruvate l yase OS=Salipiger profundus OX=1229727 GN=Ga0080559_TMP 1516 PE=4 SV=1
MRDPASLEDMTALRAEIDATDRELSALMAHRARLIARAAELKAGNGWPARITDRVDEVIANARANAERDGWDPALAELVWQELVEWSIRREQSALGRE

SEQ ID NO: 95257 - protein, 98 aa, Sphingobium sp.
  misc_feature (1)..(98): tr|A0A173KSD0|A0A173KSD0_9SPHN Isochorismate lyase OS=S phingobium sp. EP60837 OX=1855519 GN=pchB PE=4 SV=1
MNPENYTTMAEVRAGVDEIDRQLVALFAQRFAHMRAAARIKPERSAVRDEPRKAEVIENVRQAADRLDAPAEILATLWDQLVEASIAYEMTEFDRLKA

SEQ ID NO: 95258 - protein, 447 aa, Streptomyces sp.
  misc_feature (1)..(447): tr|A0A2Z5JU62|A0A2Z5JU62_9ACTN Isochorismate synthase/i sochorismate lyase OS=Streptomyces sp. Go-475 OX=207250 5 GN=mbtI PE=4 SV=1
MLRYRSARTELPGDPVLLAARLAESELFDQYVVYEREGEWWFAGDALGEVVVDRSEVRRRWLSEDAAVPLGPHPLRQVQEQLDRMAVEGWHAFGWMAYEFAHLNAGRPDRAGDARLLHLVVPHSEVRLRQGEAEVRSTDPETLEALLRLLAEPVPRTTVEARPIDVADTAGTYPGLVARAIEEIRAGELQKVILSRTVPVPYPVDFTATYVHGRSHNTPARSYLMNLGGRRVVGFSPETVAEVGADGRALTQPLAGTRARGLGEQEDERLRAELLADPKEISEHVLSVKLAEEEMATVCRPGTVSVRDLLSVRRRGSVQHLGSSVHGLLAENTTAWDVLRAVFPAVTASGIPKAPAYDCIARLEEEPRGIYSGAALMAGSDGSLDAALVLRSLFEEDGRTWLRAGAGILAGSTPARELEETCEKLRSVAPYVVPAQPAPLAAPSLRS

SEQ ID NO: 95259 - protein, 440 aa, Streptomyces sp.
  misc_feature (1)..(440): tr|A0A2K8RKP6|A0A2K8RKP6_9ACTN Isochorismate synthase/i sochorismate lyase OS=Streptomyces sp. M56 OX=1495638 G N=mbtI PE=4 SV=1
MESRHDPAATAVHLAKAGLADQYAVYEREGVWHFAAGSAVTLTADAVGITARADGRSWTSRVGTRPLEAFAQALAALENAGHQERHFYGWAAFELAHFLHGDPAAGGTAPLLHALVPCVEVSLTSDRAVVRAVDEAWAQKVGDLLAEPSTARITVDADTPVTAEGIIAAGTAAYGEAVARTVADIRAGLLEKAVLSRKVPLPAGSRADFAASYLAGRRANTPARSYLLDLGGRRAAGFSPETVLEVRKDGRVSTQPLAGTRALGTDPMQNERRRKELLTDPKEIHEHAVSVRLARDEMDAVCRDGSVVVEEFMAVKPRGSVQHLASRVTGRLGSGTGPWDAFASLFPAITATGVSKQAALGVLARYEDGPRGLYGGAVFRGSTDGSLDAALVLRTLLGEGGEVWLRAGAGVTGQSVPEREIEETCEKLRSVAPHLRYTDG

SEQ ID NO: 95260 - protein, 426 aa, Streptomyces sp.
  misc_feature (1)..(426): tr|A0A1B9F2K3|A0A1B9F2K3_9ACTN Isochorismate synthase/i sochorismate lyase OS=Streptomyces sp. PTY087I2 OX=1819 298 GN=mbtI PE=4 SV=1
MAAALAAESTDAYVLYENREEVCWAEGEAAAVEVDATGVWLECGGERSPLDTDLRPLAAAGQALAEMGGADWRAYGWATFELATSCSDAGKSPGPLARLFLPRAEIRFGDGVAVLRAQDEKALDAMVLRLAGAESRPAISEGRIEADVDFHGADAYRQAVAEAVREIRQGALDKVILSREVPVPGEIDLPATYVTGRRNNDPARSFLLRLGEWEAAGFSPEIVARVTAEGEVNAQPLAGTRALVGEPAVDDAARKELLRDAKEVFEHAISVRLAAEELAEVCEDGTVRVAEFMSVRERGSVQHLASYLVGSLREGATSWDAFATLFPAITASGIPKKEACERIRLSEKTSRGLYSGAVIMVDGDGTLDAALVLRSVYRRAGRTWLRAGAGVVAQSDPERELEETREKLRSVGRFLVPAVEPVHSAS

SEQ ID NO: 95261 - protein, 113 aa, Tepidimonas aquatica
  misc_feature (1)..(113): tr|A0A554WEN0|A0A554WEN0_9BURK Isochorismate pyruvate l yase OS=Tepidimonas aquatica OX=247482 GN=pchB PE=4 SV= 1
MTRPQGFKAVTLHTMTDVRHQVDTLDAQLVPLLLQRLQCMRAAAQIKSKRDQVRDDQRVAAVLDHVKRRARQLGADASDVDAIEAIYSQLIEFCIGYELRHFDQKSAQQEVGR

SEQ ID NO: 95262 - protein, 123 aa, Variovorax sp.
  misc_feature (1)..(123): tr|A0A2J7VWY5|A0A2J7VWY5_9BURK Isochorismate pyruvate l yase OS=Variovorax sp. B4 OX=2021405 GN=pchB PE=4 SV=1
MTEKEPDAHGAALRRFLDPAYVPLADNLAQVRERIDAIDVQIVELLAERGRYVKDAARFKRDAFQVSAPQRQQEVFDKVRRLAEEKGAYPEVVEAAYRALVAGFIAREQRDHAEMVEIGEGQP

SEQ ID NO: 95263 - protein, 96 aa, Yoonia vestfoldensis
  misc_feature (1)..(96): tr|A0A1Y0E8S9|A0A1Y0E8S9_9RHOB Isochorismate pyruvate l yase OS=Yoonia vestfoldensis OX=245188 GN=pchB PE=4 SV= 1
MADIRAEIDRIDAALVQILAERAAYIDRAAAIKAVAALPARITPRVEQVVSNVRDHAQAHGLSPDLVEMLWRQLIDWSIAREETRLGPDSDREDMR

SEQ ID NO: 95264 - DNA, 918 bp, Oxalobacteraceae bacterium
  misc_feature (1)..(918): JX491462.1.918 Bacteria Proteobacteria Gammaproteobacte ria Burkholderiales Oxalobacteraceae Undibacterium Oxal obacteraceae bacterium 25-11PB
acgatctaaggatgaaagcgggggatcgcaagacctcgtgctcatggagtggccgatatctgattagctagttggtagggtaaaagcctaccaaggcgacgatcagtagctggtttgagagaacgaccagccacactggaactgagacacggtccagactcctacgggaggcagcagtggggaattttggacaatgggggcaaccctgatccagcaatgccgcgtgagtgaagaaggccttcgggttgtaaagctcttttgtcagggaagaaacggtgagttctaatacaacttgctaatgacggtacctgaagaataagcaccggctaactacgtgccagcagccgcggtaatacgtagggtgcaagcgttaatcggaattactgggcgtaaagcgtgcgcaggcggttttataagtctgatgtgaaatccccgggctcaacctgggaactgcattggagactgtaaggctagagtgtgtcagaggggggtagaattccacgtgtagcagtgaaatgcgtagatatgtggaggaataccgatggcgaaggcagccccctgggataacactgacgctcatgcacgaaagcgtggggagcaaacaggattagataccctggtagtccacgccctaaacgatgtctactagttgtcgggtcttaattgacttggtaacgcagctaacgcgtgaagtagaccgcctggggagtacggtcgcaagattaaaactcaaaggaattgacggggacccgcacaagcggtggatgatgtggattaattcgatgcaacgcgaaaaaccttacctacccttgacatggaaggaatcccgaagagatttgggagtgctcgaaagagaacctttacacaggtgctgcatggctgtcgtcagctcgtgtcgtgagatgttgggttaagtcc

SEQ ID NO: 95265 - DNA, 1411 bp, Oxalobacteraceae bacterium
  misc_feature (1)..(1411): KX953867.1.1411 Bacteria Proteobacteria Gammaproteobact eria Burkholderiales Oxalobacteraceae Duganella Oxaloba cteraceae bacterium
tgcaagtcgaacggcagcgcggggcaacctggcggcgagtggcgaacgggtgagtaatatatcggaacgtaccctggagtgggggataacgtagcgaaagttacgctaataccgcatacgatctaaggatgaaagtgggggatcgcaagacctcatgctcctggagcggccgatatctgattagctagttggtagggtaaaagcctaccaaggcatcgatcagtagctggtctgagaggacgaccagccacactggaactgagacacggtccagactcctacgggaggcagcagtggggaattttggacaatgggcgcaagcctgatccagcaatgccgcgtgagtgaagaaggccttcgggttgtaaagctcttttgtcagggaagaaacgacatcctctaatacagggtgttaatgacggtacctgaagaataagcaccggctaactacgtgccagcagccgcggtaatacgtagggtgcaagcgttaatcggaattactgggcgtaaagcgtgcgcaggcggttttgtaagactgacgtgaaatccccgggctcaacctgggaatggcgttggtgactgcaaggctagagtttggcagaggggggtagaattccacgtgtagcagtgaaatgcgtagatatgtggaggaacaccgatggcgaaggcagccccctgggtcaaaactgacgctcatgcacgaaagcgtggggagcaaacaggattagataccctggtagtccacgccctaaacgatgtctactagttgtcgggtcttaattgacttggtaacgcagctaacgcgtgaagtagaccgcctggggagtacggtcgcaagattaaaactcaaaggaattgacggggacccgcacaagcggtggatgatgtggattaattcgatgcaacgcgaaaaaccttacctacccttgacatggatggaatcccggagagatttgggagtgcccgaaagggaaccatcacacaggtgctgcatggctgtcgtcagctcgtgtcgtgagatgttgggttaagtcccgcaacgagcgcaacccttgtcattagttgctacgaaagggcactctaatgagactgccggtgacaaaccggaggaaggtggggatgacgtcaagtcctcatggcccttatgggtagggcttcacacgtcatacaatggtacatacagagcgccgccaacccgcgagggggagctaatcgcagaaagtgtatcgtagtccggattgtagtctgcaactcgactgcatgaagttggaatcgctagtaatcgcggatcagcatgtcgcggtgaatacgttcccgggtcttgtacacaccgcccgtcacaccatgggagcgggttttaccagaagtaggtagcttaaccgcaaggagggcgcttaccacggtaggattc

SEQ ID NO: 95266 - DNA, 1504 bp, Oxalobacter formigenes
  misc_feature (1)..(1504): HG917902.1.1504 Bacteria Proteobacteria Gammaproteobact eria Burkholderiales Oxalobacteraceae Oxalobacter Oxalo bacter formigenes
tggctcagattgaacgctggcggcatgctttacacatgcaagtcgaacggcagcatgggggcaaccctgatggcgagtggcgaacgggtgagtaatatatcggaacgtacccgagagtgggggacaaccagtcgaaagattggctaataccgcatacgatctacggatgaaagtgggggaccttcgggcctcacgctcctggagcggccgatagctgattagctggttggtggggtaaaggcctaccaaggcgatgatcagtagctggtctgagaggacgatcagccacactgggactgagacacggcccagactcctacgggaggcagcagtggggaattttggacaatgggggcaaccctgatccagcaatgccgcgtgagtgaagaaggccttcgggttgtaaagctcttttgtcagggaagaaaaggaccgggttaataccctggtttcatgacggtacctgaagaataagcaccggctaactacgtgccagcagccgcggtaatacgtagggtgcgagcgttaatcggaattactgggcgtaaagcgtgcgcaggcggttgtgtaagacagatgtgaaatgcccgggcttaacctgggaattgcatttgtgactgcacggctagagtgtgtcagaggggggtagaattccacgtgtagcagtgaaatgcgtagatatgtggaggaataccgatggcgaaggcagccccctgggataacactgacgctcatgcacgaaagcgtggggagcaaacaggattagataccctggtagtccacgccctaaacgatgtcgactagttgttgggtcttaattgacttagtaacgcagctaacgcgtgaagtcgaccgcctggggagtacggtcgcaagattaaaactcaaaggaattgacggggacccgcacaagcggtggatgatgtggattaattcgatgcaacgcgaaaaaccttacctacccttgacatgtcaggaaccctgaagagattcgggggtgctcgaaagagaacctgaacacaggtgctgcatggctgtcgtcagctcgtgtcgtgagatgttgggttaagtcccgcaacgagcgcaacccttgtcattagttgctacgaaagggcactctaatgaaactgccggtgacaaaccggaggaaggtggggatgacgtcaagtcctcatggcccttatgggtagggcttcacacgtcatacaatggtgcatacagagggttgccaacccgcgagggggagctaatcccagaaagtgcatcgtagtccggattggagtctgcaactcgactccatgaagttggaatcgctagtaatcgcggatcagcatgtcgcggtgaatacgttcccgggtcttgtacacaccgcccgtcacaccatgggagcgggttttaccagaagtaggtagcttaaccgcaaggagggcgcttaccacggtaggattcgtgactggggtgaagtcgtaacaaggtagccgtatcggaaggtgcggctggatca

SEQ ID NO: 95267 - DNA, 1491 bp, Oxalobacter formigenes
  misc_feature (1)..(1491): U49756.1.1491 Bacteria Proteobacteria Gammaproteobacter ia Burkholderiales Oxalobacteraceae Oxalobacter Oxaloba cter formigenes
tgatcctggctcagattgaacgctggcggcatgctttacacatgcaagtcgaacggcagcatgggggcaacctgatggcgagtggcgaacgggtgagtaatatatcggaacgtacccgagagtgggggacaaccagtcgaaagattggctaataccgcatacgatctacggatgaaagtgggggaccttcgggcctcacgctcctggagcggccgatagctgattagctagttggtggggtaaaggcctaccaaggcgatgatcagtagctggtctgagaggacgatcagccacactgggactgagacacggcccagactcctacgggaggcagcagtggggaattttggacaatgggggcaaccctgatccagcaatgccgcgtgagtgaagaaggccttcgggttgtaaagctcttttgtcagggaagaaaaggactgggttaataccctggtttcatgacggtacctgaagaataagcaccggctaactaggtgccagcagccgcggtaatacgtagggtgcgagcgttaatcggaattactgggcgtaaagcgtgcgcaggcggttgtgtaagacagatgtgaaatgcccgggcttaacctgggaattgcatttgtgactgaacggctagagtgtgtcagaggggggtagaattccacgtgtagcagtgaaatgcgtagatatgtggaggaataccgatggcgaaggcagttccctgggataacactgacgatcatgcacgaaagcgtggggagcaaacaggattagataccctggtagtccacgccctaaacgatgtcgactagttgttgggtcttaattgacttagtaacgaaactaacgcgtgaagtcgaccgcctggggagtacggtcgcaagattaaaactcaaaggaattgacggggatttaccaagcggtggatgatgtggattaattcgatgcaacgcgaaaaaccttacctacccttgacatgtcaggaaccctgaagagattcgggggtgctcgaaagagaacctgaacacaggtgctgcatggctgttgtcagctcgtgtcgtgagatgttgggttaagtcccgcaacgagcgcaacccttgtcattagttgctacgaaagggcactctaatgaaactgccggtgacaaaccggaggaaggtggggatgacgtcaagtcctcatggcccttatgggtagggcttcacacgtcatacaatggtgcatacagagggttgccaacccgcgagggggagctaatcccagaaagtgcatcgtagtccggattggagtctgcaactcgactccatgaagttggaatcgctagtaatcgcggatcagcatgtcgcggtgaatacgttcccgggtcttgtacacaccgcccgtcacaccatgggagcgggttttaccagaagtaggtagcttaaccgcaaggagggcgcttaccacggtaggattcgtgactggggtgaagtcgtaacaaggtaaagccgaatt

SEQ ID NO: 95268 - DNA, 1250 bp, Trinickia symbiotica
  misc_feature (1)..(1250): FN543709.1.1250 Bacteria Proteobacteria Gammaproteobact eria Burkholderiales Burkholderiaceae Burkholderia-Caba lleronia-Paraburkholderia Trinickia symbiotica
aacgggtgagtaagacatcggaacgtgtcctggagtgggggatagcccggcgaaagccggattaataccgcatacgctctgtggaggaaagcgggggatcgcaagacctcgcgctcaaggggcggccgatggcggattagctagttggtggggtaaaggcctaccaaggcgacgatccgtagctggtctgagaggacgaccagccacactgggactgagacacggcccagactcctacgggaggcagcagtggggaattttggacaatgggggcaaccctgatccagcaatgccgcgtgtgtgaagaaggccttcgggttgtaaagcacttttgtccggaaagaaatcctcggggctaatatccctgggggatgacggtaccggaagaataagcaccggctaactacgtgccagcagccgcggtaatacgtagggtgcgagcgttaatcggaattactgggcgtaaagcgtgcgcaggcggtgcgttaagagcgatgtgaaatccccgggcttaacctgggaactgcattgttgactggcgcgctagagtatggcagaggggggtagaattccacgtgtagcagtgaaatgcgtagagatgtggaggaataccgatggcgaaggcagccccctgggccaatactgacgctcatgcacgaaagcgtggggagcaaacaggattagataccctggtagtccacgccctaaacgatgtcaactagttgttggggattcatttccttagtaacgaagctaacgcgtgaagttgaccgcctggggagtacggtcgcaagattaaaactcaaaggaattgacggggacccgcacaagcggtggatgatgtggattaattcgatgcaacgcgaaaaaccttacctacccttgacatggacggaaccctggtgagagctgggggtgcccgaaagggagccgtcacacaggtgctgcatggctgtcgtcagctcgtgtcgtgagatgttgggttaagtcccgcaacgagcgcaacccttgtccttagttgctacgcaagagcactctaaggagactgccggtgacaaaccggaggaaggtggggatgacgtcaagtcctcatggcccttatgggtagggcttcacacgtcatacaatggtcggaacagagggttgccaacccgcgagggggagccaatcccagaaaaccgatcgtagtccggattgcactctgcaactcgagtgcatgaagctggaatcgctagtaatcgcggatcagc

SEQ ID NO: 95269 - DNA, 1438 bp, Massilia consociata
  misc_feature (1)..(1438): FN814307.1.1438 Bacteria Proteobacteria Gammaproteobact eria Burkholderiales Oxalobacteraceae Massilia Massilia consociata
gaacgctggcggcatgctttacacatgcaagtcgaacggcagcacgggcttcggcctggtggcgagtggcgaacgggtgagtaatatatcggaacgtacccagaagtgggggataacgtagcgaaagttacgctaataccgcatacgatctacggatgaaagtgggggaccttcgggcctcatgcttgtggagcggccgatatctgattagctagtaggtagggtaaaggcctacctaggcgacgatcagtagctggtctgagaggacgaccagccacactgggactgagacacggcccagactcctacgggaggcagcagtggggaattttggacaatgggcgcaagcctgatccagcaatgccgcgtgagtgaagaaggccttcgggttgtaaagctcttttgtcagggaagaaacggctgaggttaataccttcggctaatgacggtacctgaagaataagcaccggctaactacgtgccagcagccgcggtaatacgtagggtgcaagcgttaatcggaattactgggcgtaaagcgtgcgcaggcggttttgtaagtctgacgtgaaatccccgggctcaacctgggaattgcgttggagactgcaaggctggagtctggcagaggggggtagaattccacgtgtagcagtgaaatgcgtagagatgtggaggaacaccgatggcgaaggcagccccctgggtcaagactgacgctcatgcacgaaagcgtggggagcaaacaggattagataccctggtagtccacgccctaaacgatgtctactagttgtcgggttttaattaacttggtaacgcagctaacgcgtgaagtagaccgcctggggagtacggtcgcaagattaaaactcaaaggaattgacggggacccgcacaagcggtggatgatgtggattaattcgatgcaacgcgaaaaaccttacctacccttgacatggaaggaatcccgaagagatttgggagtgcccgaaagggagccttcacacaggtgctgcatggctgtcgtcagctcgtgtcgtgagatgttgggttaagtcccgcaacgagcgcaacccttgtcattagttgctacgcaagagcactctaatgagactgccggtgacaaaccggaggaaggtggggatgacgtcaagtcctcatggcccttatgggtagggcttcacacgtcatacaatggtacatacagagggccgccaacccgcgagggggagctaatcccagaaagtgtatcgtagtccggattgtagtctgcaactcgactacatgaagttggaatcgctagtaatcgcggatcagcatgtcgcggtgaatacgttcccgggtcttgtacacaccgcccgtcacaccatgggagcgggttttaccagaagtaggtagcttaaccgcaaggagggcgcttaccacggtaggattc

SEQ ID NO: 95270 - DNA, 1455 bp, Sutterella stercoricanis
  misc_feature (1)..(1455): AJ566849.1.1455 Bacteria Proteobacteria Gammaproteobact eria Burkholderiales Sutterellaceae Sutterella Sutterel la stercoricanis
ggcggcatgctttacacatgcaagtcgaacggcagcacagggagcttgctcctgggtggcgagtggcgcacgggtgagtaatacatcggaacgtgtcctattgtgggggataactgtcggaaagggtggctaataccgcataagacctgagggtgaaagcgggggatcgcaagacctcgcgcaattggagcggccgatgcccgattagctagttggtgaggtaatagcttaccaaggcgacgatcggtagctggtctgagaggacgaccagccacactgggactgagacacggcccagactcctacgggaggcagcagtggggaattttggacaatgggggcaaccctgatccagccatgccgcgtgcaggatgaaggtcttcggattgtaaactgcttttgtcagggacgaaaaggattgtgctaataccatgatctgctgacggtacctgaagaataagcaccggctaactacgtgccagcagccgcggtaatacgtagggtgcaagcgttaatcggaattactgggcgtaaagcgtgcgcaggcggttctgtaagacagatgtgaaatccccgggctcaacctgggaattgcatttgtgactgcaggactagagttcatcagaggggggtggaattccaagtgtagcagtgaaatgcgtagatatttggaagaacaccaatggcgaaggcagccccctgggatgcgactgacgctcatgcacgaaagcgtggggagcaaacaggattagataccctggtagtccacgccctaaacgatgtctactggttgttggggattaatatccttggtaacgaagctaacgcgtgaagtagaccccctggggagagcggtcgcaagattaaaactcaaaggaattgacggggacccgcacaagcggtggatgatgtggattaattcgatgcaacgcgaaaaaccttacgtagccttgacatgccaggaatcctgaagagatttgggagtgcccgcaagggaatctggacacaggtgctgcatggctgtcgtcagctcgtgtcgtgagatgttgggttaagtcccgcaacgagcgcaacccttgtcattagttgctacgcaagagcactctaatgagactgccggtgacaaaccggaggaaggtggggatgacgtcaagtcctcatggcccttatggctagggcctcacacgtcatacaatggtcggaacagagggcagcgaagccgcgaggtggagcaaatcccagaaaaccgatcgtagtccggattgcagtctgcaactcgactgcatgaagtcggaatcgctagtaatcgcggatcagcatgccgcggtgaatacgttcccgggtcttgtacacaccgcccgtcacaccatgggagtggggttcaccagaagacgtttgtctaaccgtaaggaaggacggcgtccacggtgggtttcatgactggggtgaagtcgt

SEQ ID NO: 95271 - DNA, 1345 bp, Comamonas kerstersii
  misc_feature (1)..(1345): AJ430347.1.1345 Bacteria Proteobacteria Gammaproteobact eria Burkholderiales Comamonadaceae Comamonas Comamonas kerstersii
tgccttacacatgcaagtcgaacggcagcacggacttcggtctggtggcgagtggcgaacgggtgagtaatacatcggaccgtgcctagtagtgggggataactactcgaaagagtggctaataccgcatgagatctacggatgaaagcaggggatcgcaagaccttgtgctactagagcggccgatggcagattaggtagttggtgggataaaagcttaccaagccaacgatctgtagctggtctgagaggacgatcagccacactgggactgagacacggcccatactcctacgggaggcagcagtggggaattttggacaatgggcgaaagcctgatccagcaatgccgcgtgcaggatgaaggccttcgggttgtaaactgcttttgtacggaacgaaaagcttcgggttaataccctggagtcatgacggtaccgtaagaataagcaccggctaactacgtgccagcagccgcggtaatacgtagggtgcaagcgttaatcggaattactgggcgtaaagcgtgcgcaggcggttttgtaagacagaggtgaaatccccgggctcaacctgggaactgcctttgtgactgcaaggctagagtacggcagagggggatggaattccgcgtgtagcagtgaaatgcgtagatatgcggaggaacaccgatggcgaaggcaatcccctgggcctgtactgacgctcatgcacgaaagcgtggggagcaaacaggattagataccctggtagtccacgccctaaacgatgtcaactggttgttgggtcttcattgactcagtaacgaaagctaacgcgtgaagttgaccggcctggggagtaccggcgcaagggttgaaacctcaaaggaattgacggggacccccgcacaagcggtggatgatgtggttaattcgatgcaacgcgaaaaaccttacccacctttgacatggcaggaatcctttagagatagaggagtgctcgaaagagaacctgcacacaggtgctgcatggctgtcgtcagctcgtgtcgtgagatgttgggttaagtcccgcaacgagcgcaacccttgccattagttgctacgaaagggcactctaatgggactgccggtgacaaaccggaggaaggtggggatgacgtcaagtcctcatggcccttataggtggggctacacacgtcatacaatggctggtacaaagggttgccaacccgcgagggggagctaatcccataaagccagtcgtagtccggatcgcagtctgcaactcgactgcgtgaagtcggaatcgctagtaatcgtggatcagcatgtcacggtgaatacgttcccgggtcttgtac

SEQ ID NO: 95272 - DNA, 1469 bp, Caballeronia sordidicola
  misc_feature (1)..(1469): AF512826.1.1469 Bacteria Proteobacteria Gammaproteobact eria Burkholderiales Burkholderiaceae Burkholderia-Caba lleronia-Paraburkholderia Caballeronia sordidicola
ttgaacgctggcggcatgccttacacatgcaagtcgaacggcagcacgggggcaaccctggtggcgagtggcgaacgggtgagtaatacatcggaacgtgtcctgtagtgggggatagcccggcgaaagccggattaataccgcatacgatctacggaagaaagcgggggaccttagggcctcgcgctataggggcggccgatggcagattagctagttggtggggtaaaggcctaccaaggcgacgatctgtagctggtctgagaggacgaccagccacactgggactgagacacggcccagactcctacgggaggcagcagtggggaattttggacaatgggggcaaccctgatccagcaatgccgcgtgtgtgaagaaggccttcgggttgtaaagcacttttgtccggaaagaaaaccttcgctctaatacagtggagggatgacggtaccggaagaataagcaccggctaactacgtgccagcagccgcggtaatacgtagggtgcgagcgttaatcggaattactgggcgtaaagcgtgcgcaggcggttcgttaagacagatgtgaaatccccgggcttaacctgggaactgcatttgtgactggcgagctagagtatggcagaggggggtagaattccacgtgtagcagtgaaatgcgtagagatgtggaggaataccgatggcgaaggcagccccctgggccaatactgacgctcatgcacgaaagcgtggggagcaaacaggattagataccctggtagtccacgccctaaacgatgtcaactagttgttggggattcatttccttagtaacgtagctaacgcgtgaagttgaccgcctggggagtacggtcgcaagattaaaactcaaaggaattgacggggacccgcacaagcggtggatgatgtggattaattcgatgcaacgcgaaaaaccttacctacccttgacatggtcggaacctggctgaaaggctggggtgctcgaaagagaaccgatacacaggtgctgcatggctgtcgtcagctcgtgtcgtgagatgttgggttaagtcccgcaacgagcgcaacccttgtccttagttgctacgcaagagcactctaaggagactgccggtgacaaaccggaggaaggtggggatgacgtcaagtcctcatggcccttatgggtagggcttcacacgtcatacaatggtcggaacagagggctgccaacccgtgagggggagctaatcccagaaaaccgatcgtagtccggatcgtagtctgcaactcgactacgtgaagctggaatcgctagtaatcgcggatcagcatgccgcggtgaatacgttcccgggtcttgtacacaccgcccgtcacaccatgggagtgggttttaccagaagtggctagtctaaccgcaaggaggacggtcaccacggtaggattcatgactggggtgaagtcgtaacaaggtag

SEQ ID NO: 95273 - DNA, 1509 bp, Lysobacter enzymogenes
  misc_feature (1)..(1509): AJ298291.1.1509 Bacteria Proteobacteria Gammaproteobact eria Xanthomonadales Xanthomonadaceae Lysobacter Lysoba cter enzymogenes
ggctcagagtgaacgctggcggcaggcctaacacatgcaagtcgaacggcagcacagaggagcttgctccttgggtggcgagtggcggacgggtgaggaatacgtcggaatctgcctatttgtgggggataacgtagggaaacttacgctaataccgcatacgacctacgggtgaaagtgggggaccgcaaggcctcacgcagatagatgagccgacgtcggattagctagttggcggggtaaaggcccaccaaggcgacgatccgtagctggtctgagaggatgatcagccacactggaactgagacacggtccagactcctacgggaggcagcagtggggaatattggacaatgggcgcaagcctgatccagccatgccgcgtgtgtgaagaaggccttcgggttgtaaagcacttttgtccggaaagaaaagcttagggttaataaccctgagtcatgacggtaccggaagaataagcaccggctaacttcgtgccagcagccgcggtaatacgaagggtgcaagcgttactcggaattactgggcgtaaagcgtgcgtaggtggtttgttaagtctgatgtgaaagccctgggctcaacctgggaatggcattggaaactggcttactacagtgcggtagagggtagcggaattcccggtgtagcagtgaaatgcgtagatatcgggaggaacatccgtggcgaaggcggctacctggaccagcactgacactgaggcacgaaagcgtggggagcaaacaggattagataccctggtagtccacgccctaaacgatgcgaactggatgttgggggcaacttggccctcagtatcgaagctaacgcgttaagttcgccgcctgggaagtacggtcgcaagactgaaactcaaaggaattgacgggggcccgcacaagcggtggagtatgtggtttaattcgatgcaacgcgcagaaccttacctggccttgacatgtcgagaactttccagagatggattggtgccttcgggaactcgaacacaggtgctgcatggctgtcgtcagctcgtgtcgtgagatgttgggttaagtcccgcaacgagcgcaacccttgtccttagttgccagcacgtaatggtgggaactctaaggagaccgccggtgacaaaccggaggaaggtggggatgacgtcaagtcatcatggcccttacggccagggctacacacgtactacaatggtagggacagagggctgcaaacccgcgagggcaagccaatcccagaaaccctatctcagtccggattggagtctgcaactcgactccatgaagtcggaatcgctagtaatcgcagatcagcattgctgcggtgaatacgttcccgggccttgtacacaccgcccgtcacaccatgggagtttgttgcaccagaagcaggtagcttaaccttcgggagggcgctttgccacggtgttggccgatgactggggtgaaagtccgtaacaaggtagccgtatcggaaggt

SEQ ID NO: 95274 - DNA, 1542 bp, Cupriavidus taiwanensis
  misc_feature (1)..(1542): AF300324.1.1542 Bacteria Proteobacteria Gammaproteobact eria Burkholderiales Burkholderiaceae Cupriavidus Cupri avidus taiwanensis
agagtttgatcctggctcagattgaacgctggcggcatgccttacacatgcaagtcgaacggcagcgcgggcttcggcctggcggcgagtggcgaacgggtgagtaatacatcggaacgtgccctgtcgtgggggataactagtcgaaagattagctaataccgcatacgacctgagggtgaaagcgggggaccggtaacggcctcgcgcgataggagcggccgatgtctgattagctagttggtggggtaaaggcctaccaaggcgacgatcagtagctggtctgagaggacgatcagccacactgggactgagacacggcccagactcctacgggaggcagcagtggggaattttggacaatgggggcaaccctgatccagcaatgccgcgtgtgtgaagaaggccttcgggttgtaaagcacttttgtccggaaagaaatggccctggctaatacccggggtcggtgacggtaccggaagaataagcaccggctaactacgtgccagcagccgcggtaatacgtagggtgcgagcgttaatcggaattactgggcgtaaagcgtgcgcaggcggtttgataagacaggcgtgaaatccccgggctcaacctgggaatggcgcttgtgactgtcaggctagagtgcgtcagaggggggtagaattccacgtgtagcagtgaaatgcgtagagatgtggaggaataccgatggcgaaggcagccccctgggacgtgactgacgctcatgcacgaaagcgtggggagcaaacaggattagataccctggtagtccacgccctaaacgatgtcaactagttgttggggattcatttcttcagtaacgtagctaacgcgtgaagttgaccgcctggggagtacggtcgcaagattaaaactcaaaggaattgacggggacccgcacaagcggtggatgatgtggattaattcgatgcaacgcgaaaaaccttacctacccttgacatgccactaacgaagcagagatgcattaggtgcccgaaagggaaagtggacacaggtgctgcatggctgtcgtcagctcgtgtcgtgagatgttgggttaagtcccgcaacgagcgcaacccttgtctctagttgctacgcaagagcactctagagagactgccggtgacaaaccggaggaaggtggggatgacgtcaagtcctcatggcccttatgggtagggcttcacacgtcatacaatggtgcgtacagagggttgccaacccgcgagggggagctaatcccagaaaacgcatcgtagtccggatcgtagtctgcaactcgactacgtgaagctggaatcgctagtaatcgcggatcagcatgccgcggtgaatacgttcccgggtcttgtacacaccgcccgtcacaccatgggagtgggttttgccagaagtagttagcctaaccgcaaggagggcgattaccacggcagggttcatgactggggtgaagtcgtaacaaggtagccgtatcggaaggtgcggctggatcacctccttaagcttggatcccggg

SEQ ID NO: 95275 - DNA, 1386 bp, Lysobacter capsici
  misc_feature (1)..(1386): AB908111.1.1386 Bacteria Proteobacteria Gammaproteobact eria Xanthomonadales Xanthomonadaceae Lysobacter Lysoba cter capsici
cggcagcacagaggagcttgctccttgggtggcgagtggcggacgggtgaggaatacgtcggaatctgcctatttgtgggggataacgtagggaaacttacgctaataccgcatacgacctacgggtgaaagcggaggaccttcgggcttcgcgcagatagatgagccgacgtcggattagctagttggcggggtaaaggcccaccaaggcgacgatccgtagctggtctgagaggatgatcagccacactggaactgagacacggtccagactcctacgggaggcagcagtggggaatattggacaatgggcgcaagcctgatccagccatgccgcgtgtgtgaagaaggccttcgggttgtaaagcacttttgtccggaaagaaaagccttgggttaataccctgaggtcatgacggtaccggaagaataagcaccggctaacttcgtgccagcagccgcggtaatacgaagggtgcaagcgttactcggaattactgggcgtaaagcgtgcgtaggtggtttgttaagtctgatgtgaaagccctgggctcaacctgggaatggcattggaaactggctgactagagtgcggtagagggtagtggaattcccggtgtagcagtgaaatgcgtagatatcgggaggaacatctgtggcgaaggcgactacctggaccagcactgacactgaggcacgaaagcgtggggagcaaacaggattagataccctggtagtccacgccctaaacgatgcgaactggatgttgggagcaacttggctctcagtatcgaagctaacgcgttaagttcgccgcctgggaagtacggtcgcaagactgaaactcaaaggaattgacgggggcccgcacaagcggtggagtatgtggtttaattcgatgcaacgcgaagaaccttacctggccttgacatccacggaactttctagagatagattggtgccttcgggaaccgtgagacaggtgctgcatggctgtcgtcagctcgtgtcgtgagatgttgggttaagtcccgcaacgagcgcaacccttgtccttagttgccagcacgtaatggtgggaactctaaggagaccgccggtgacaaaccggaggaaggtggggatgacgtcaagtcatcatggcccttacggccagggctacacacgtactacaatggtagggacagagggctgcaaacccgcgagggcaagccaatcccagaaaccctatctcagtccggatcggagtctgcaactcgactccgtgaagtcggaatcgctagtaatcgcagatcagcattgctgcggtgaatacgttcccgggccttgtacacaccgcccgtcacaccatgggagtttgttgcaccagaagcaggtagcttaacc

SEQ ID NO: 95276 - DNA, 1454 bp, Piscinibacter aquaticus
  misc_feature (1)..(1454): AB681749.1.1454 Bacteria Proteobacteria Gammaproteobact eria Burkholderiales Comamonadaceae Piscinibacter Pisci nibacter aquaticus
attgaacgctggcggcatgccttacacatgcaagtcgaacggtaacgcggggcaacctggcgacgagtggcgaacgggtgagtaatgcatcggaacgtgcccagtagtgggggatagcccggcgaaagccggattaataccgcatacgacctacgggtgaaagggggggatcgcaagacctctcgctattggagcggccgatgtcagattagctagttggtggggtaaaggcctaccaaggcgacgatctgtagctggtctgagaggacgaccagccacactgggactgagacacggcccagactcctacgggaggcagcagtggggaattttggacaatgggggcaaccctgatccagccatgccgcgtgcgggaagaaggccttcgggttgtaaaccgcttttgtcggggaagaaacggtctgcgctaataccgcgggctaatgacggtacccgaagaataagcaccggctaactacgtgccagcagccgcggtaatacgtagggtgcaagcgttaatcggaattactgggcgtaaagcgtgcgcaggcggctttgcaagacagatgtgaaatccccgggctcaacctgggaactgcatttgtgactgcatggctggagtgcggcagaggggggtggaattccgcgtgtagcagtgaaatgcgtagatatgcggaggaacaccgatggcgaaggcaatcccctgggcctgcactgacgctcatgcacgaaagcgtggggagcaaacaggattagataccctggtagtccacgccctaaacgatgtcaactggttgttggacggcttgctgttcagtaacgaagctaacgcgtgaagttgaccgcctggggagtacggccgcaaggttgaaactcaaaggaattgacggggacccgcacaagcggtggatgatgtggtttaattcgatgcaacgcgaaaaaccttacctacccttgacatgccaggaacttgccagagatggcttggtgctcgaaagagaacctggacacaggtgctgcatggccgtcgtcagctcgtgtcgtgagatgttgggttaagtcccgcaacgagcgcaacccttatcattagttgctacgcaagggcactctaatgagactgccggtgacaaaccggaggaaggtggggatgacgtcaggtcatcatggcccttatgggtagggctacacacgtcatacaatggccggtacagagggctgccaacccgcgagggggagctaatctcagaaaaccggtcgtagtccggatcgcagtctgcaactcgactgcgtgaagtcggaatcgctagtaatcgcggatcagcttgccgcggtgaatacgttcccgggtcttgtacacaccgcccgtcacaccatgggagcgggttctgccagaagtagttagcctaaccgcaaggggggcgattaccacggcagggttcgtgactggggtgaag

SEQ ID NO: 95277 - DNA, 1316 bp, Alicycliphilus denitrificans
  misc_feature (1)..(1316): AB908107.1.1316 Bacteria Proteobacteria Gammaproteobact eria Burkholderiales Comamonadaceae Alicycliphilus Alic ycliphilus denitrificans
cttcggatgctgacgagtggcgaacgggtgagtaatacatcggaacgtgcccgatcgtgggggataacgaagcgaaagctttgctaataccgcatacgatctacggatgaaagcgggggatcttcggacctcgcgcggacggagcggccgatggcagattaggtagttggtgggataaaagcttaccaagccgacgatctgtagctggtctgagaggatgatcagccacactgggactgagacacggcccagactcctacgggaggcagcagtggggaattttggacaatgggcgcaagcctgatccagccatgccgcgtgcaggatgaaggccttcgggttgtaaactgcttttgtacggaacgaaaaggtgccttctaataaagggcgctcatgacggtaccgtaagaataagcaccggctaactacgtgccagcagccgcggtaatacgtagggtgcgagcgttaatcggaattactgggcgtaaagcgtgcgcaggcggttttgtaagacagaggtgaaatccccgggctcaacctgggaactgcctttgtgactgcaaggctggagtgcggcagagggggatggaattccgcgtgtagcagtgaaatgcgtagatatgcggaggaacaccgatggcgaaggcaatcccctgggcctgcactgacgctcatgcacgaaagcgtggggagcaaacaggattagataccctggtagtccacgccctaaacgatgtcaactggttgttggggattaattttctcagtaacgaagctaacgcgtgaagttgaccgcctggggagtacggccgcaaggttgaaactcaaaggaattgacggggacccgcacaagcggtggatgatgtggtttaattcgatgcaacgcgaaaaaccttacccacctttgacatgtatggaatcccgaagagatttgggagtgctcgaaagagagccataacacaggtgctgcatggctgtcgtcagctcgtgtcgtgagatgttgggttaagtcccgcaacgagcgcaacccttgccattagttgctacgaaagggcactctaatgggactgccggtgacaaaccggaggaaggtggggatgacgtcaagtcctcatggcccttataggtggggctacacacgtcatacaatggctggtacagagggtagccaacccgcgagggggagccaatcccacaaagccagtcgtagtccggatcgcagtctgcaactcgactgcgtgaagtcggaatcgctagtaatcgcggatcagaatgtcgcggtgaatacgttcccgggtcttgtacacaccgcccgt

SEQ ID NO: 95278 - DNA, 1475 bp, Variovorax boronicumulans
  misc_feature (1)..(1475): AB300597.1.1475 Bacteria Proteobacteria Gammaproteobact eria Burkholderiales Comamonadaceae Variovorax Variovor ax boronicumulans
tgaacgctggcggcatgccttacacatgcaagtcgaacggcagcgcgggagcaatcctggcggcgagtggcgaacgggtgagtaatacatcggaacgtgcccaatcgtgggggataacgcagcgaaagctgtgctaataccgcatacgatctacggatgaaagcaggggatcgcaagaccttgcgcgaatggagcggccgatggcagattaggtagttggtgaggtaaaggctcaccaagccttcgatctgtagctggtctgagaggacgaccagccacactgggactgagacacggtccagactcctacgggaggcagcagtggggaattttggacaatgggcgaaagcctgatccagccatgccgcgtgcaggatgaaggccttcgggttgtaaactgcttttgtacggaacgaaacggtcttttctaatacagaaggctaatgacggtaccgtaagaataagcaccggctaactacgtgccagcagccgcggtaatacgtagggtgcaagcgttaatcggaattactgggcgtaaagcgtgcgcaggcggttatgtaagacagttgtgaaatccccgggctcaacctgggaactgcatctgtgactgcatagctagagtacggtagagggggatggaattccgcgtgtagcagtgaaatgcgtagatatgcggaggaacaccgatggcgaaggcaatcccctggacctgtactgacgctcatgcacgaaagcgtggggagcaaacaggattagataccctggtagtccacgccctaaacgatgtcaactggttgttgggtcttcactgactcagtaacgaagctaacgcgtgaagttgaccgcctggggagtacggccgcaaggttgaaactcaaaggaattgacggggacccgcacaagcggtggatgatgtggtttaattcgatgcaacgcgaaaaaccttacccacctttgacatgtacggaattcgccagagatggcttagtgctcgaaagagaaccgtaacacaggtgctgcatggctgtcgtcagctcgtgtcgtgagatgttgggttaagtcccgcaacgagcgcaacccttgtcattagttgctacattcagttgggcactctaatgagactgccggtgacaaaccggaggaaggtggggatgacgtcaagtcctcatggcccttataggtggggctacacacgtcatacaatggctggtacaaagggttgccaacccgcgagggggagctaatcccataaaaccagtcgtagtccggatcgcagtctgcaactcgactgcgtgaagtcggaatcgctagtaatcgtggatcagaatgtcacggtgaatacgttcccgggtcttgtacacaccgcccgtcacaccatgggagcgggttctgccagaagtagttagcttaaccgcaaggagggcgattaccacggcagggttcgtgactggggtgaagtcgtaacaaggtagcca

SEQ ID NO: 95279 - DNA, 725 bp, Acinetobacter calcoaceticus
  misc_feature (1)..(725): AB542935.1.725 Bacteria Proteobacteria Gammaproteobacte ria Pseudomonadales Moraxellaceae Acinetobacter Acineto bacter calcoaceticus
cggacgggtgagtaatgcttaggaatctgcctattagtgggggacaacatttcgaaaggaatgctaataccgcatacgtcctacgggagaaagcaggggatcttcggaccttgcgctaatagatgagcctaagtcggattagctagttggtggggtaaaggcctaccaaggcgacgatctgtagcgggtctgagaggatgatccgccacactgggactgagacacggcccagactcctacgggaggcagcagtggggaatattggacaatgggcgcaagcctgatccagccatgccgcgtgtgtgaagaaggccttatggttgtaaagcactttaagcgaggaggaggctactttagataatacctagagatagtggacgttactcgcagaataagcaccggctaactctgtgccagcagccgcggtaatacagagggtgcaagcgttaatcggatttactgggcgtaaagcgcgcgtaggcggctaattaagtcaaatgtgaaatccccgagcttaacttgggaattgcattcgatactggttagctagagtgtgggagaggatggtagaattccaggtgtagcggtgaaatgcgtagagatctggaggaataccgatggcgaaggcagccatctggcctaacactgacgctgaggtgcgaaagcatggggagcaaaacaggattagataccctggtagtccatgccgtaaacgatgtctacta

SEQ ID NO: 95280 - DNA, 1472 bp, Xanthomonas campestris
  misc_feature (1)..(1472): AB680404.1.1472 Bacteria Proteobacteria Gammaproteobact eria Xanthomonadales Xanthomonadaceae Xanthomonas Xanth omonas campestris
agtgaacgctggcggcaggcctaacacatgcaagtcgaacggcagcacagtaagagcttgctcttatgggtggcgagtggcggacgggtgaggaatacatcggaatctactctttcgtgggggataacgtagggaaacttacgctaataccgcatacgacctacgggtgaaagcggaggaccttcgggcttcgcgcgattgaatgagccgatgtcggattagctagttggcggggtaaaggcccaccaaggcgacgatccgtagctggtctgagaggatgatcagccacactggaactgagacacggtccagactcctacgggaggcagcagtggggaatattggacaatgggcgcaagcctgatccagccatgccgcgtgggtgaagaaggccttcgggttgtaaagcccttttgttgggaaagaaaagcagtcggttaatacccgattgttctgacggtacccaaagaataagcaccggctaacttcgtgccagcagccgcggtaatacgaagggtgcaagcgttactcggaattactgggcgtaaagcgtgcgtaggtggtggtttaagtctgttgtgaaagccctgggctcaacctgggaattgcagtggatactgggtcactagagtgtggtagagggtagcggaattcccggtgtagcagtgaaatgcgtagagatcgggaggaacatccgtggcgaaggcggctacctggaccaacactgacactgaggcacgaaagcgtggggagcaaacaggattagataccctggtagtccacgccctaaacgatgcgaactggatgttgggtgcaatttggcacgcagtatcgaagctaacgcgttaagttcgccgcctggggagtacggtcgcaagactgaaactcaaaggaattgacgggggcccgcacaagcggtggagtatgtggtttaattcgatgcaacgcgaagaaccttacctggtcttgacatccacggaactttccagagatggattggtgccttcgggaaccgtgagacaggtgctgcatggctgtcgtcagctcgtgtcgtgagatgttgggttaagtcccgcaacgagcgcaacccttgtccttagttgccagcacgtaatggtgggaactctaaggagaccgccggtgacaaaccggaggaaggtggggatgacgtcaagtcatcatggcccttacgaccagggctacacacgtactacaatggtagggacagagggctgcaaacccgcgagggtaagccaatcccagaaaccctatctcagtccggattggagtctgcaactcgactccatgaagtcggaatcgctagtaatcgcagatcagcattgctgcggtgaatacgttcccgggccttgtacacaccgcccgtcacaccatgggagtttgttgcaccagaagcaggtagcttaaccttcgggagggcgcttgccacggtgtggccgatgactggggtgaag

SEQ ID NO: 95281 - DNA, 1458 bp, Noviherbaspirillum massiliense; identical to SEQ ID NO: 246
  misc_feature (1)..(1458): AB542397.1.1458 Bacteria Proteobacteria Gammaproteobact eria Burkholderiales Oxalobacteraceae Noviherbaspirillu m Noviherbaspirillum massiliense

SEQ ID NO: 95282 - DNA, 1501 bp, Xanthomonas axonopodis
  misc_feature (1)..(1501): AB101445.1.1501 Bacteria Proteobacteria Gammaproteobact eria Xanthomonadales Xanthomonadaceae Thermomonas Xanth omonas axonopodis
gagtttgatcctggctcagagtgaacgctggcggcaggcctaatacatgcaagtcgaacggcagcacagtggagcttgctccatgggtggcgagtggcggacgggtgaggaatacatgggaatctgcccagtcgtgggggataacgtatggaaacgtacgctaataccgcatgcgcccttcgggggaaagtcggggaccgcaaggcctgacgcgattggatgagcccatgttcgattagctagttggcggggtaacggcccaccaaggcgacgatcgatagctggtctgagaggatgatcagccacactggaactgagacacggtccagactcctacgggaggcagcagtagggaatattggacaatgggcgcaagcctgatccagccatgccgcgtgagtgaagaaggccctcgggttgtaaagctcttttgttggggaagaaaagcagttggttaatacccgattgttctgacggtacccaaagaataagcaccggctaacttcgtgccagcagccgcggtaatacgaagggtgcaagcgttactcggaattactgggcgtaaagcgtgcgtaggtggttgtttaagtctgatgtgaaagccctgggctcaacctgggaatggcattggatactggatagctagagtgcggtagagggtagtggaattcccggtgtagcagtgaaatgcgtagagatcgggaggaacatccgtggcgaaggcgactacctgggccagcactgacactgaggcacgaaagcgtggggagcaaacaggattagataccctggtagtccacgccctaaacgatgcgaactggatgttgggctcaacttggagctcagtatcgaagctaacgcgttaagttcgccgcctggggagtacggtcgcaagactgaaactcaaaggaattgacgggggcccgcacaagcggtggagtatgtggtttaattcgatgcaacgcgaagaaccttacctggccttgacatgcacggaatcctttagagatagaggagtgccttcgggaaccgtgacacaggtgctgcatggctgtcgtcagctcgtgtcgtgagatgttgggttaagtcccgcaacgagcgcaacccttgtccttagttgccagcacgtaatggtgggaactctaaggagaccgccggtgacaaaccggaggaaggtggggatgacgtcaagtcatcatggcccttacggccagggctacacacgtactacaatggtggggacagagggctgcaagcgcgcgagcgtgagccaatcccagaaaccccatctcagtccggattggagtctgcaactcgactccatgaagtcggaatcgctagtaatcgcagatcagcattgctgcggtgaatacgttcccgggccttgtacacaccgcccgtcacaccatgggagtttgttgcaccagaagcaggtagcttaaccttcgggggggcgcttgccacggtgtggccgatgactggggtgaagtcgtaacaaggt

SEQ ID NO: 95283 - DNA, 1487 bp, Paraburkholderia terrae
  misc_feature (1)..(1487): AB201284.1.1487 Bacteria Proteobacteria Gammaproteobact eria Burkholderiales Burkholderiaceae Burkholderia-Caba lleronia-Paraburkholderia Paraburkholderia terrae
  misc_feature (84)..(84): n is a, c, g, or t
ctgagttttaatctggctcagattgaacgctggcggcatgccttacacatgcaagtcgaacggcagcgcgggggcaaccctggnggcgagtggcgaacgggtgagtaatacatcggaacgtgtcctggagtgggggatagcccggcgaaagccggattaataccgcatacgatctcaggatgaaagcgggggaccgaaaggcctcgcgctcaaggggcggccgatggcagattagctagttggtggggtaaaggcctaccaaggcgacgatctgtagctggtctgagaggacgaccagccacactgggactgagacacggcccagactcctacgggaggcagcagtggggaattttggacaatgggggcaaccctgatccagcaatgccgcgtgtgtgaagaaggccttcgggttgtaaagcacttttgtccggaaagaaaacctccgtcctaatacggtggggggatgacggtaccggaagaataagcaccggctaactacgtgccagcagccgcggtaatacgtagggtgcaagcgttaatcggaattactgggcgtaaagcgtgcgcaggcggttcgctaagaccgatgtgaaatccccgggcttaacctgggaactgcattggtgactggcgggctagagtatggcagaggggggtagaattccacgtgtagcagtgaaatgcgtagagatgtggaggaataccgatggcgaaggcagccccctgggccaatactgacgctcatgcacgaaagcgtggggagcaaacaggattagataccctggtagtccacgccctaaacgatgtcaactagttgtcgggtcttcattgacttggtaacgaagctaacgcgtgaagttgaccgcctggggagtacggtcgcaagattaaaactcaaaggaattgacggggacccgcacaagcggtggatgatgtggattaattcgatgcaacgcgaaaaaccttacctacccttgacatgtacggaaccttgccgagaggtgagggtgcccgaaagggagccgtaacacaggtgctgcatggctgtcgtcagctcgtgtcgtgagatgttgggttaagtcccgcaacgagcgcaacccttgtccctagttgctacgcaagagcactctagggagactgccggtgacaaaccggaggaaggtggggatgacgtcaagtcctcatggcccttatgggtagggcttcacacgtcatacaatggtcggaacagagggttgccaagccgcgaggtggagccaatcccagaaaaccgatcgtagtccggatcgcagtctgcaactcgactgcgtgaagctggaatcgctagtaatcgcggatcagcatgccgcggtgaatacgttcccgggtcttgtacacaccgcccgtcacaccatgggagtgggttttaccagaagtggctagtctaaccgcaaggaggacggtcaccacggtaggattcatgactggggtgaagtcgtacaggg

SEQ ID NO: 95284 - DNA, 1195 bp, Burkholderia cenocepacia
  misc_feature (1)..(1195): AB272319.1.1195 Bacteria Proteobacteria Gammaproteobact eria Burkholderiales Burkholderiaceae Burkholderia-Caba lleronia-Paraburkholderia Burkholderia cenocepacia
tgagtaatacatcggaacatgtcctgtagtgggggatagcccggcgaaagccggattaataccgcatacgatctacggatgaaagcgggggaccttcgggcctcgcgctatagggttggccgatggctgattagctagttggtggggtaaaggcctaccaaggcgacgatcagtagctggtctgagaggacgaccagccacactgggactgagacacggcccagactcctacgggaggcagcagtggggaattttggacaatgggcgaaagcctgatccagcaatgccgcgtgtgtgaagaaggccttcgggttgtaaagcacttttgtccggaaagaaatccttggctctaatacagtcgggggatgacggtaccggaagaataagcaccggctaactacgtgccagcagccgcggtaatacgtagggtgcgagcgttaatcggaattactgggcgtaaagcgtgcgcaggcggtttgctaagaccgatgtgaaatccccgggctcaacctgggaactgcattggtgactggcaggctagagtatggcagaggggggtagaattccacgtgtagcagtgaaatgcgtagagatgtggaggaataccgatggcgaaggcagccccctgggccaatactgacgctcatgcacgaaagcgtggggagcaaacaggattagataccctggtagtccacgccctaaacgatgtcaactagttgttggggattcatttccttagtaacgtagctaacgcgtgaagttgaccgcctggggagtacggtcgcaagattaaaactcaaaggaattgacggggacccgcacaagcggtggatgatgtggattaattcgatgcaacgcgaaaaaccttacctacccttgacatggtcggaatcctgccgagaggtgggagtgctcgaaagagaaccggcgcacaggtgctgcatggctgtcgtcagctcgtgtcgtgagatgttgggttaagtcccgcaacgagcgcaacccttgtccttagttgctacgcaagagcactctaaggagactgccggtgacaaaccggaggaaggtggggatgacgtcaagtcctcatggcccttatgggtagggcttcacacgtcatacaatggtcggaacagagggttgccaacccgcgagggggagctaatcccagaaaaccgatgcgtagtgccggattgca

SEQ ID NO: 95285 - DNA, 1435 bp, Methylorubrum extorquens
  misc_feature (1)..(1435): AB175630.1.1435 Bacteria Proteobacteria Alphaproteobact eria Rhizobiales Beijerinckiaceae Methylobacterium-Meth ylorubrum Methylorubrum extorquens
cgaacgctggcggcaggcttaacacatgcaagtcgaacgggcaccttcgggtgtcagtggcagacgggtgagtaacacgtgggaacgtacccttcggttcggaataactcagggaaacttgagctaataccggatacgcccttatggggaaaggtttactgccgaaggatcggcccgcgtctgattagcttgttggtggggtaacggcctaccaaggcgacgatcagtagctggtctgagaggatgatcagccacactgggactgagacacggcccagactcctacgggaggcagcagtggggaatattggacaatgggcgcaagcctgatccagccatgccgcgtgagtgatgaaggccttagggttgtaaagctcttttgtccgggacgataatgacggtaccggaagaataagccccggctaacttcgtgccagcagccgcggtaatacgaagggggctagcgttgctcggaatcactgggcgtaaagggcgcgtaggcggccgattaagtcgggggtgaaagcctgtggctcaaccacagaattgccttcgatactggttggcttgagaccggaagaggacagcggaactgcgagtgtagaggtgaaattcgtagatattcgcaagaacaccagtggcgaaggcggctgtctggtccggttctgacgctgaggcgcgaaagcgtggggagcaaacaggattagataccctggtagtccacgccgtaaacgatgaatgccagccgttggcctgcttgcaggtcagtggcgccgctaacgcattaagcattccgcctggggagtacggtcgcaagattaaaactcaaaggaattgacgggggcccgcacaagcggtggagcatgtggtttaattcgaagcaacgcgcagaaccttaccatcccttgacatggcatgttacctcgagagatcggggatcctcttcggaggcgtgcacacaggtgctgcatggctgtcgtcagctcgtgtcgtgagatgttgggttaagtcccgcaacgagcgcaacccacgtccttagttgccatcattcagttgggcactctagggagactgccggtgataagccgcgaggaaggtgtggatgacgtcaagtcctcatggcccttacgggatgggctacacacgtgctacaatggcggtgacagtgggacgcgaagccgcgaggtggagcaaatccccaaaaaccgtctcagttcggattgcactctgcaactcgggtgcatgaaggcggaatcgctagtaatcgtggatcagcacgccacggtgaatacgttcccgggccttgtacacaccgcccgtcacaccatgggagttggtcttacccgacggcgctgcgccaaccgcaaggaggcaggcgaccacggtagggtcagcgactggggtgaagtcgtaacaaggtagccgtaggggaacc

SEQ ID NO: 95286 - DNA, 1468 bp, Ralstonia pickettii
  misc_feature (1)..(1468): AB004790.1.1468 Bacteria Proteobacteria Gammaproteobact eria Burkholderiales Burkholderiaceae Ralstonia Ralston ia pickettii
  misc_feature (836)..(836): n is a, c, g, or t
gctcagattgaacgctggcggcatgcttacacatgcaagtcgaacggcagcatgatctagcttgctagattgatggcgagtggcgaacgggtgagtaatacatcggaacgtgccctgtagtgggggataactagtcgaaagattagctaataccgcatacgacctgagggtgaaagtgggggaccgcaaggcctcatgctataggagcggccgatgtctgattagctagttggtggggtaaaggcccaccaaggcgacgatcagtagctggtctgagaggacgatcagccacactgggactgagacacggcccagactcctacgggaggcagcagtggggaattttggacaatgggcgaaactgatccagcaatgccgcgtgtgtgaagaaggccttcgggttgtaaagcacttttgtccggaaagaaatggctctggttaatacctggggtcgatgacggtaccggaagaataaggaccggctaactacgtgccagcagccgcggtaatacgtagggtccaagcgttaatcggaattactgggcgtaaagcgtgcgcaggcggttgtgcaagaccgatgtgaaatccccgagcttaacttgggaattgcattggtgactgcacggctagagtgtgtcagaggggggtagaattccacgtgtagcagtgaaatgcgtagagatgtggaggaataccgatggcgaaggcagccccctgggataacactgacgctcatgcacgaaagcgtggggagcaaacaggattagataccctggtagtccacgccctaaacgatgtcaactagttgttggggattcatttccttagtaacgtantaacgcgtgaagttgaccgcctggggagtacggtcgcaagattaaaactcaaaggaattgacggggacccgcacaagcggtggatgatgtggattaattcgatgcaacgcgaaaaaccttacctacccttgacatgccactaacgaagcagagatgcattaggtgctcgaaagagaaagtggacacaggtgctgcatggctgtcgtcagctcgtgtcgtgagatgttgggttaagtcccgcaacgagcgcaacccttgtctctagttgctacgaaagggcactctagagagactgccggtgacaaaccggaggaaggtggggatgacgtcaagtcctcatggcccttatgggtagggcttcacacgtcatacaatggtgcatacagagggttgccaagccgcgaggtggagctaatcccagaaaatgcatcgtagtccggatcgtagtctgcaactcgactacgtgaagctggaatcgctagtaatcgcggatcagcatgccgcggtgaatacgttcccgggtcttgtacacaccgcccgtcacaccatgggagtgggctttaccagaagtagttagcctaacccgcaacggagggcgattaccaccggtagggttcatgactcggggtgag

SEQ ID NO: 95287 - DNA, 1503 bp, Janthinobacterium lividum
  misc_feature (1)..(1503): AB021388.1.1503 Bacteria Proteobacteria Gammaproteobact eria Burkholderiales Oxalobacteraceae Janthinobacterium Janthinobacterium lividum
  misc_feature (842)..(843): n is a, c, g, or t
  misc_feature (1110)..(1110): n is a, c, g, or t
  misc_feature (1154)..(1160): n is a, c, g, or t
ttgatcctggctcagattgaacgctggcggcatgccttacacatgcaagtcgaacggcagcacggagcttgctctggtggcgagtggcgaacgggtgagtaatatatcggaacgtaccctagagtgggggataacgtagcgaaagttacgctaataccgcatacgatctaaggatgaaagtgggggatcgcaagacctcatgctcgtggagcggccgatatctgattagctagttggtagggtaaaagcctaccaaggcatcgatcagtagctggtctgagaggacgaccagccacactggaactgagacacggtccagactcctacgggaggcagcagtggggaattttggacaatgggcgaaagcctgatccagcaatgccgcgtgagtgaagaaggccttcgggttgtaaagctcttttgtcagggaagaaacggtgagagctaatatctcttgctaatgacggtacctgaagaataagcaccggctaactacgtgccagcagccgcggtaatacgtagggtgcaagcgttaatcggaattactgggcgtaaagcgtgcgcaggcggttttgtaagtctgatgtgaaatccccgggctcaacctgggaattgcattggagactgcaaggctagaatctggcagaggggggtagaattccacgtgtagcagtgaaatgcgtagatatgtggaggaacaccgatggcgaaggcagccccctgggtcaagattgacgctcatgcacgaaagcgtggggagcaaacaggattagataccctggtagtccacgccctaaacgatgtctactagttgtcgggtcttaattgacttggtaacgcanntaacgcgtgaagtagaccgcctggggagtacggtcgcaagattaaaactcaaaggaattgacggggacccgcacaagcggtggatgatgtggattaattcgatgcaacgcgaaaaaccttacctacccttgacatggctggaatccttgagagatcagggagtgctcgaaagagaaccagtacacaggtgctgcatggctgtcgtcagctcgtgtcgtgagatgttgggttaagtcccgcaacgagcgcaacccttgtcattagttnctacgaaagggcactctaatgagactgccggtgacaaaccggannnnnnnggggatgacgtcaagtcctcatggcccttatgggtagggcttcacacgtcatacaatggtacatacagagcgccgccaacccgcgagggggagctaatcgcagaaagtgtatcgtagtccggattgtagtctgcaactcgactgcatgaagttggaatcgctagtaatcgcggatcagcatgtcgcggtgaatacgttcccgggtcttgtacacaccgcccgtcacaccatgggagcgggttttaccagaagtaggtagcttaaccgtaaggagggcgcttaccacggtaggattcgtgactggggtgaagtcgtaacaaggtagccgtatcggaaggtgcgg

SEQ ID NO: 95288 - DNA, 1506 bp, Pseudomonas fluorescens
  misc_feature (1)..(1506): AB091837.1.1506 Bacteria Proteobacteria Gammaproteobact eria Enterobacterales Yersiniaceae Serratia Pseudomonas fluorescens
tgaagagtttgatcatggctcagattgaacgctggcggcaggcttaacacatgcaagtcgagcggtagcacaggggagcttgctccctgggtgacgagcggcggacgggtgagtaatgtctgggaaactgcctgatggagggggataactactggaaacggtagctaataccgcataacgtcgcaagaccaaagagggggaccttcgggcctcttgccatcagatgtgcccagatgggattagctagtaggtggggtaatggctcacctaggcgacgatccctagctggtctgagaggatgaccagccacactggaactgagacacggtccagactcctacgggaggcagcagtggggaatattgcacaatgggcgcaagcctgatgcagccatgccgcgtgtgtgaagaaggccttcgggttgtaaagcactttcagcgaggaggaaggtggtgagcttaatacgctcatcaattgacgttactcgcagaagaagcaccggctaactccgtgccagcagccgcggtaatacggagggtgcaagcgttaatcggaattactgggcgtaaagcgcacgcaggcggtttgttaagtcagatgtgaaatccccgggctcaacctgggaactgcatttgaaactggcaagctagagtctcgtagaggggggtagaattccaggtgtagcggtgaaatgcgtagagatctggaggaataccggtggcgaaggcggccccctggacgaagactgacgctcaggtgcgaaagcgtggggagcaaacaggattagataccctggtagtccacgctgtaaacgatgtcgatttggaggttgtgcccttgaggcgtggcttccggagctaacgcgttaaatcgaccgcctggggagtacggccgcaaggttaaaactcaaatgaattgacgggggcccgcacaagcggtggagcatgtggtttaattcgatgcaacgcgaagaaccttacctactcttgacatccagagaactttccagagatggattggtgccttcgggaactctgagacaggtgctgcatggctgtcgtcagctcgtgttgtgaaatgttgggttaagtcccgcaacgagcgcaacccttatcctttgttgccagcggttcggccgggaactcaaaggagactgccagtgataaactggaggaaggtggggatgacgtcaagtcatcatggcccttacgagtagggctacacacgtgctacaatggcgtatacaaagagaagcgacctcgcgagagcaagcggacctcataaagtacgtcgtagtccggattggagtctgcaactcgactccatgaagtcggaatcgctagtaatcgtagatcagaatgctacggtgaatacgttcccgggccttgtacacaccgcccgtcacaccatgggagtgggttgcaaaagaagtaggtagcttaaccttcgggagggcgcttaccactttgtgattcatgactggggtgaagtcgtaacaaggtaacc

SEQ ID NO: 95289 - DNA, 1474 bp, Comamonas testosteroni
  misc_feature (1)..(1474): AB007996.1.1474 Bacteria Proteobacteria Gammaproteobact eria Burkholderiales Comamonadaceae Comamonas Comamonas testosteroni
tttgatcctggctcagattgaacgctggcggcatgctttacacatgcaagtcgaacggtaacaggtcttcggatgctgacgagtggcgaacgggtgagtaatacatcggaacgtgcctagtagtgggggataactactcgaaagagtagctaataccgcatgagatctacggatgaaagcaggggaccttcgggccttgtgctactagagcggctgatggcagattaggtagttggtggggtaaaggcttaccaagcctgcgatctgtagctggtctgagaggacgaccagccacactgggactgagacacggcccagactcctacgggaggcagcagtggggaattttggacaatgggcgaaagcctgatccagcaatgccgcgtgcaggatgaaggccctcgggttgtaaactgcttttgtacggaacgaaaagcctggggctaatatccccgggtcatgacggtaccgtaagaataagcaccggctaactacgtgccagcagccgcggtaatacgtagggtgcaagcgttaatcggaattactgggcgtaaagcgtgcgcaggcggttttgtaagacagtggtgaaatccccgggctcaacctgggaactgccattgtgactgcaaggctagagtgcggcagagggggatggaattccgcgtgtagcagtgaaatgcgtagatatgcggaggaacaccgatggcgaaggcaatcccctgggcctgcactgacgctcatgcacgaaagcgtggggagcaaacaggattagataccctggtagtccacgccctaaacgatgtcaactggttgttgggtcttaactgactcagtaacgaagctaacgcgtgaagttgaccgcctggggagtacggccgcaaggttgaaactcaaaggaattgacggggacccgcacaagcggtggatgatgtggtttaattcgatgcaacgcgaaaaaccttacccacctttgacatggcaggaacttaccagagatggtttggtgctcgaaagagaacctgcacacaggtgctgcatggctgtcgtcagctcgtgtcgtgagatgttgggttaagtcccgcaacgagcgcaacccttgccattagttgctacattcagttgagcactctaatgggactgccggtgacaaaccggaggaaggtggggatgacgtcaagtcctcatggcccttataggtggggctacacacgtcatacaatggctggtacaaagggttgccaacccgcgagggggagctaatcccataaagccagtcgtagtccggatcgcagtctgcaactcgactgcgtgaagtcggaatcgctagtaatcgtggatcagaatgtcacggtgaatacgttcccgggtcttgtacacaccgcccgtcacaccatgggagcgggtctcgccagaagtaggtagcctaaccgtaaggagggcgcttaccacggcggggttcgtgactggggtgaag

SEQ ID NO: 95290 - DNA, 1546 bp, Rhodanobacter denitrificans
  misc_feature (1)..(1546): AJXV01000059.262.1807 Bacteria Proteobacteria Gammaprot eobacteria Xanthomonadales Rhodanobacteraceae Rhodanoba cter Rhodanobacter denitrificans
taagtgaagagtttgatcctggctcagattgaacgctggcggcatgcctaacacatgcaagtcgaacggcagcacagaggagcttgctccttgggtggcgagtggcggacgggtgagtaatgcatcgggatctaccctgacgtgggggataacctcgggaaaccgggactaataccgcatacgtcctacgggagaaagcgggggaccttcgggcctcgcgcggcaggacgaaccgatgtgcgattagctagttggcggggtaatggcccaccaaggcgacgatcgctagctggtctgagaggatgatcagccacactgggactgagacacggcccagactcctacgggaggcagcagtggggaatattggacaatgggcgcaagcctgatccagcaatgccgcgtgtgtgaagaaggccttcgggttgtaaagcacttttatcaggagcgaaataccacgggttaataccctatggggctgacggtacctgaggaataagcaccggctaacttcgtgccagcagccgcggtaatacgaagggtgcaagcgttaatcggaattactgggcgtaaagggtgcgtaggcggttacttaagtctgtcgtgaaatccccgggctcaacctgggaatggcgatggatactgggtggctagagtgtgtcagaggatggtggaattcccggtgtagcggtgaaatgcgtagagatcgggaggaacatcagtggcgaaggcggccatctgggacaacactgacgctgaagcacgaaagcgtggggagcaaacaggattagataccctggtagtccacgccctaaacgatgcgaactggatgttggtctcaactcggagatcagtgtcgaagctaacgcgttaagttcgccgcctggggagtacggtcgcaagactgaaactcaaaggaattgacgggggcccgcacaagcggtggagtatgtggtttaattcgatgcaacgcgaagaaccttacctggccttgacatgtccggaatcctgcagagatgcgggagtgccttcgggaatcggaacacaggtgctgcatggctgtcgtcagctcgtgtcgtgagatgttgggttaagtcccgcaacgagcgcaacccttgtccttagttgccagcacgtaatggtgggaactctaaggagactgccggtgacaaaccggaggaaggtggggatgacgtcaagtcatcatggcccttacggccagggctacacacgtactacaatggtcggtacagagggttgcaagaccgcgaggtggagccaatcccagaaagccgatcccagtccggattggagtctgcaactcgactccatgaagtcggaatcgctagtaatcgcggatcagctatgccgcggtgaatacgttcccgggccttgtacacaccgcccgtcacaccatgggagtgggttgctccagaaggcgttagtctaaccgcaagggggacgacgcccacggagtggtccatgactggggtgaagtcgtaacaaggtagccgtatcggaaggtgcggctggatcacctcctttc

SEQ ID NO: 95291 - DNA, 1449 bp, Klebsiella pneumoniae
  misc_feature (1)..(1449): AB004753.1.1449 Bacteria Proteobacteria Gammaproteobact eria Enterobacterales Enterobacteriaceae Klebsiella Kle bsiella pneumoniae
  misc_feature (149)..(149): n is a, c, g, or t
acgctggcggcaggcctaacacatgcaagtcgagcggtagcacagagagcttgctctcgggtgacgagcggcggacgggtgagtaatgtctgggaaactgcctgatggagggggataactactggaaacggtagctaataccgcataangtcgcaagaccaaagtgggggaccttcgggcctcatgccatcagatgtgcccagatgggattagctagtaggtggggtaacggctcacctaggcgacgatccctagctggtctgagaggatgaccagccacactggaactgagacacggtccagactcctacgggaggcagcagtggggaatattgcacaatgggcgcaagcctgatgcagccatgccgcgtgtgtgaagaaggccttcgggttgtaaagcactttcagcggggaggaaggcgatgaggttaataacctcatcgattgacgttacccgcagaagaagcaccggctaactccgtgccagcagccgcggtaatacggagggtgcaagcgttaatcggaattactgggcgtaaagcgcacgcaggcggtctgtcaagtcggatgtgaaatccccgggctcaacctgggaactgcattcgaaactggcaggctagagtcttgtagaggggggtagaattccaggtgtagcggtgaaatgcgtagagatctggaggaataccggtggcgaaggcggccccctggacaaagactgacgctcaggtgcgaaagcgtggggagcaaacaggattagataccctggtagtccacgccgtaaacgatgtcgatttggaggttgtgcccttgaggcgtggcttccggagctaacgcgttaaatcgaccgcctggggagtacggccgcaaggttaaaactcaaatgaattgacgggggcccgcacaagcggtggagcatgtggtttaattcgatgcaacgcgaagaaccttacctggtcttgacatccacagaactttccagagatggattggtgccttcgggaactgtgagacaggtgctgcatggctgtcgtcagctcgtgttgtgaaatgttgggttaagtcccgcaacgagcgcaacccttatcctttgttgccagcggttaggccgggaactcaaaggagactgccagtgataaactggaggaaggtggggatgacgtcaagtcatcatggcccttacgaccagggctacacacgtgctacaatggcatatacaaagagaagcgacctcgcgagagcaagcggacctcataaagtatgtcgtagtccggattggagtctgcaactcgactccatgaagtcggaatcgctagtaatcgtagatcagaatgctacggtgaatacgttcccgggccttgtacacaccgcccgtcacaccatgggagtgggttgcaaaagaagtaggtagcttaaccttcgggagggcgcttaccactttgtgattcatga

SEQ ID NO: 95292 - protein, 24 aa, Acinetobacter calcoaceticus
  misc_feature (1)..(24): sp|P27532|PQQA_ACICA Coenzyme PQQ synthesis protein A O S=Acinetobacter calcoaceticus OX=471 GN=pqqA PE=1 SV=1
MQWTKPAFTDLRIGFEVTMYFEAR

SEQ ID NO: 95293 - protein, 29 aa, Methylorubrum extorquens
  misc_feature (1)..(29): sp|Q49148|PQQA_METEA Coenzyme PQQ synthesis protein A O S=Methylorubrum extorquens (strain ATCC 14718 / DSM 133 8 / JCM 2805 / NCIMB 9133 / AM1) OX=272630 GN=pqqA PE=3 SV=1
MKWAAPIVSEICVGMEVTSYESAEIDTFN

SEQ ID NO: 95294 - protein, 23 aa, Klebsiella pneumoniae
  misc_feature (1)..(23): sp|P27503|PQQA_KLEPN Coenzyme PQQ synthesis protein A O S=Klebsiella pneumoniae OX=573 GN=pqqA PE=3 SV=1
MWKKPAFIDLRLGLEVTLYISNR

SEQ ID NO: 95295 - protein, 23 aa, Pseudomonas fluorescens
  misc_feature (1)..(23): tr|Q4KEK3|Q4KEK3_PSEF5 Coenzyme PQQ synthesis protein A OS=Pseudomonas fluorescens (strain ATCC BAA-477 / NRRL B-23932 / Pf-5) OX=220664 GN=pqqA_2 PE=3 SV=1
MWHKPAYTDLRIGFEVTMYFANR

SEQ ID NO: 95296 - protein, 24 aa, Methylobacillus flagellatus
  misc_feature (1)..(24): sp|Q50436|PQQA_METFL Coenzyme PQQ synthesis protein A O S=Methylobacillus flagellatus OX=405 GN=pqqA PE=3 SV=1
MMWTKPEVTEMRFGFEVTMYVCNR

SEQ ID NO: 95297 - protein, 26 aa, Xanthomonas axonopodis
  misc_feature (1)..(26): tr|A0A2S6YG69|A0A2S6YG69_9XANT Pyrroloquinoline quinone peptide PqqA OS=Xanthomonas axonopodis pv. begoniae OX =473403 GN=pqqA PE=4 SV=1
MKTWKKPVVREVNCGAEINCYVSGEF

SEQ ID NO: 95298 - protein, 27 aa, Lysobacter enzymogenes
  misc_feature (1)..(27): tr|A0A1T3VDP8|A0A1T3VDP8_LYSEN Coenzyme PQQ peptide Pqq A OS=Lysobacter enzymogenes OX=69 GN=pqqA PE=4 SV=1
MKTWSKPQIREIPCGCEINSYSSGDLF

SEQ ID NO: 95299 - protein, 26 aa, Xanthomonas campestris
  misc_feature (1)..(26): tr|A0A3E1LAP6|A0A3E1LAP6_XANCA Pyrroloquinoline quinone peptide PqqA OS=Xanthomonas campestris OX=339 GN=pqqA PE=4 SV=1
MKTWKKPVVREVNCGAEINCYVSGEF

SEQ ID NO: 95300 - protein, 26 aa, Xanthomonas axonopodis
  misc_feature (1)..(26): tr|A0A443ZCF0|A0A443ZCF0_XANMN Pyrroloquinoline quinone peptide PqqA OS=Xanthomonas axonopodis pv. manihotis s tr. CIO151 OX=1185660 GN=pqqA PE=4 SV=1
MKTWKKPVVREVNCGAEINCYVSGEF

SEQ ID NO: 95301 - protein, 77 aa, Lysobacter capsici
  misc_feature (1)..(77): tr|A0A0S2FUI7|A0A0S2FUI7_9GAMM Coenzyme PQQ peptide Pqq A OS=Lysobacter capsici OX=435897 GN=pqqA PE=4 SV=1
MVSRSRRSAAMHAARRIARPAHRNVRCGRAQAVARAVNAGTAHSPPRGTLMKTWSKPQIREISVGCEINSYSSGDLF

SEQ ID NO: 95302 - protein, 24 aa, Rhodanobacter denitrificans
  misc_feature (1)..(24): tr|A0A2W5MMB4|A0A2W5MMB4_9GAMM Pyrroloquinoline quinone peptide PqqA OS=Rhodanobacter denitrificans OX=666685 GN=pqqA PE=4 SV=1
MTWETPQARDHRYGFEVTMYIANR

SEQ ID NO: 95303 - protein, 24 aa, Cupriavidus taiwanensis
  misc_feature (1)..(24): sp|B3R8D5|PQQA_CUPTR Coenzyme PQQ synthesis protein A O S=Cupriavidus taiwanensis (strain DSM 17343 / BCRC 1720 6 / CIP 107171 / LMG 19424 / R1) OX=977880 GN=pqqA PE=3 SV=1
MTWTTPAYTELRLGFEITMYIANR

SEQ ID NO: 95304 - protein, 24 aa, Burkholderia cenocepacia
  misc_feature (1)..(24): sp|B4EHL5|PQQA_BURCJ Coenzyme PQQ synthesis protein A O S=Burkholderia cenocepacia (strain ATCC BAA-245 / DSM 1 6553 / LMG 16656 / NCTC 13227 / J2315 / CF5610) OX=2165 91 GN=pqqA PE=3 SV=1
MQWTTPSYTDLRFGFEITMYIANR

SEQ ID NO: 95305 - protein, 24 aa, Piscinibacter aquaticus
  misc_feature (1)..(24): tr|A0A5C6U5Q7|A0A5C6U5Q7_9BURK Coenzyme PQQ synthesis p rotein A OS=Piscinibacter aquaticus OX=392597 GN=pqqA P E=3 SV=1
MQWQTPAAADFRFGFEITMYVAAR

SEQ ID NO: 95306 - protein, 24 aa, Variovorax sp.
  misc_feature (1)..(24): tr|A0A1C6LYD6|A0A1C6LYD6_9BURK Coenzyme PQQ synthesis p rotein A OS=Variovorax sp. HW608 OX=1034889 GN=pqqA PE= 3 SV=1
MHWSKPAFEDMRFGFEITMYISHR

SEQ ID NO: 95307 - protein, 24 aa, Cupriavidus sp.
  misc_feature (1)..(24): tr|R7XP94|R7XP94_9BURK Coenzyme PQQ synthesis protein A OS=Cupriavidus sp. GA3-3 OX=1229514 GN=pqqA PE=3 SV=1
MRWTTPAYTELRLGFEITMYIANR

SEQ ID NO: 95308 - protein, 24 aa, Paraburkholderia sp.
  misc_feature (1)..(24): tr|A0A4Q6WY31|A0A4Q6WY31_9BURK Coenzyme PQQ synthesis p rotein A OS=Paraburkholderia sp. UYCP14C OX=2511130 GN= pqqA PE=3 SV=1
MQWTTPSYTDVRLGFEIVMYVATR

SEQ ID NO: 95309 - protein, 23 aa, Burkholderia sp.
  misc_feature (1)..(23): tr|A0A4V8GD81|A0A4V8GD81_9BURK Coenzyme PQQ synthesis p rotein A OS=Burkholderia sp. USM B20 OX=1571773 GN=pqqA PE=3 SV=1
MWTKPAYTDLRLGFEVTMYVSNR

SEQ ID NO: 95310 - protein, 24 aa, Ralstonia pickettii
  misc_feature (1)..(24): tr|A0A2A4AFG7|A0A2A4AFG7_RALPI Coenzyme PQQ synthesis p rotein A OS=Ralstonia pickettii OX=329 GN=pqqA PE=3 SV= 1
MNWTTPAYTELRLGFEITMYIANR

SEQ ID NO: 95311 - protein, 24 aa, Trinickia symbiotica
  misc_feature (1)..(24): tr|A0A2N7X1K2|A0A2N7X1K2_9BURK Coenzyme PQQ synthesis p rotein A OS=Trinickia symbiotica OX=863227 GN=pqqA PE=3 SV=1
MQWTPPAYTDLRFGFEVTMYIATR

SEQ ID NO: 95312 - protein, 24 aa, Sutterellaceae bacterium
  misc_feature (1)..(24): tr|A0A2E2R1W1|A0A2E2R1W1_9BURK Coenzyme PQQ synthesis p rotein A OS=Sutterellaceae bacterium OX=2026794 GN=pqqA PE=3 SV=1
MQWTTPSFVDMRFGFEITMYIANR

SEQ ID NO: 95313 - protein, 24 aa, Variovorax boronicumulans
  misc_feature (1)..(24): tr|A0A250DUS5|A0A250DUS5_9BURK Coenzyme PQQ synthesis p rotein A OS=Variovorax boronicumulans OX=436515 GN=pqqA PE=3 SV=1
MKWCKPEFEEMRFGFEITMYISAR

SEQ ID NO: 95314 - protein, 102 aa, Caballeronia sordidicola
  misc_feature (1)..(102): tr|A0A158FML0|A0A158FML0_9BURK Coenzyme PQQ synthesis p rotein A OS=Caballeronia sordidicola OX=196367 GN=pqqA PE=3 SV=1
MGTWDTLLQNRDSQARARRGTFRRQNQPLPAAMFGTCFKQAAQPLSLRRHAVCKDVPAGTRVKASSRRFPLVNLMETTMQWTTPSYTDMRFGFEITMYIATR

SEQ ID NO: 95315 - protein, 24 aa, Massilia sp.
  misc_feature (1)..(24): tr|A0A3D0DV77|A0A3D0DV77_9BURK Coenzyme PQQ synthesis p rotein A OS=Massilia sp. OX=1882437 GN=pqqA PE=3 SV=1
MTWSKPEFIDWRFGFEITLYIANR

SEQ ID NO: 95316 - protein, 24 aa, Janthinobacterium sp.
  misc_feature (1)..(24): tr|A0A410UXT0|A0A410UXT0_9BURK Coenzyme PQQ synthesis p rotein A OS=Janthinobacterium sp. 17J80-10 OX=2497863 G N=pqqA PE=3 SV=1
MQWTKPEFTDLRFGFEITMYIANR

SEQ ID NO: 95317 - protein, 24 aa, Alicycliphilus sp.
  misc_feature (1)..(24): tr|A0A5C8C4P3|A0A5C8C4P3_9BURK Coenzyme PQQ synthesis p rotein A OS=Alicycliphilus sp. OX=1872437 GN=pqqA PE=3 SV=1
MTWHTPAYCEIRLGFEVTAYVYVR

SEQ ID NO: 95318 - protein, 67 aa, Comamonas sp.
  misc_feature (1)..(67): tr|A0A3N1X279|A0A3N1X279_9BURK Coenzyme PQQ synthesis p rotein A OS=Comamonas sp. BIGb0124 OX=2485130 GN=pqqA P E=3 SV=1
MVSARDIAHPAPHNASSPCTPAGAPRCSFHSFFFPPTTQESQIMKWETPKAIDLRFGFEITMYVFNR

SEQ ID NO: 95319 - protein, 24 aa, Noviherbaspirillum sp.
  misc_feature (1)..(24): tr|A0A3A3GT30|A0A3A3GT30_9BURK Coenzyme PQQ synthesis p rotein A OS=Noviherbaspirillum sp. K1S02-23 OX=2320865 GN=pqqA PE=3 SV=1
MQWTKPEFTDWRFGFEITMYIANR

SEQ ID NO: 95320 - protein, 24 aa, Oxalobacteraceae bacterium
  misc_feature (1)..(24): tr|A0A4Q3KMC8|A0A4Q3KMC8_9BURK Coenzyme PQQ synthesis p rotein A OS=Oxalobacteraceae bacterium OX=1871070 GN=pq qA PE=3 SV=1
MTWQTPQAIDVRLGFEITMYISNR

SEQ ID NO: 95321 - protein, 31 aa, Oxalobacteraceae bacterium
  misc_feature (1)..(31): tr|A0A4Q3HQ09|A0A4Q3HQ09_9BURK Coenzyme PQQ synthesis p rotein A OS=Oxalobacteraceae bacterium OX=1871070 GN=pq qA PE=3 SV=1
MKWTAPKFVEVSCGMEINRYAPADGSEPVLF
